United States Patent Application Publication US 2026/0108570 A1 - sequence listing, part 3

SEQ ID NO: 50 - DNA, 143187 bp, unidentified
  source 1..143187: mol_type = genomic DNA
atgataatcgagcgtaatgagaagaaggtagaagttagtaccaacgtcaaacgctatcaggctggtatcgcgatcaatgcggaaactttcagtatcttgatcgatggtatttatgaggacaagatccttgctgcctgtcgtgaacccctgttcaatgcggtagatgcacacacagaagccggatgccgggacaaaccgattatcatccactccccaacggaccttgaaccgtggtattctgtaaaagatggtggtattgggatggactttgacatggttacccagaccttcatgatgttggggtcgtccactaaacgtgaatccaacgaactgatcggtgcgaaaggtattggctccaaggccccgttcaccgttacggacatgttcagtgtcatctccatcaaagatggtactaaaactgtgtactctgttcataaagaccaagggatacctgaggttgtgcctctccacgagtcaaaaaccatagaagaaaatggtgttgaaatcaaattcaacgttgacccggcagagactgagaaataccgccgtgcaattatcagttgcctgcgttatgctaagttcccttacgagatcaatgacccatttgtgacttcatctattcgagaccgtacctacccggtgcagtatacgttcaaagatgaagaatctggttggatgctggaaatgtattcgtcggtatctaacaatgctgatagcgttgtggttatgggacaacagccgtacaaatcaaagtttctgagcaataaccctgaatggcccctgatgatggtgtccatcccaatcggggattgcgatgtcaatccgggacgtgaatggactatcgagggcaagaatgaccgtggcttcgaagagcgccttaagacattcgttcagacggcccttgatcgccgtggtgaagaaatttaccatgaactccgtaagcttccaaaacttgcggatgttctggagtatatgaagcgagttggcgggtggtttgctacaaaatacggcgcaaaatacattgcggaattgttcagagattatgttgacactgtaagcgtgaagggatgtgtaacttacaacggtcacggggagaagcgcagaactgacaaagactattcatatgcggatatgatgaatggttaccatcttgtatacaacgacgacaataagctggttagaagtaaatgtaatcagttgtttgatgtaacaggtaaggccgtctatctgacggacaatcttggtgtggcacaaatgtgtgataatccattctttgcgggaatggtccataagctgtcggatttggaaaagcgcccagcatcgaagtcggataaaaagtatggcggctatagcctgtatgaaccagggcatccagtatggatcattgagcagagtggagctattaggaaaacacgtatctctcgtgcagattttgatgatattaaatatgccatgatttattctggtggtcaggcgcgtgggacttgtgatcttggatctacggcgtacctttctaaccgtcatcaaccagagaccttcttgtcggatcttggtattgatgataaattgtacatcgtacctttaaaccgagtgagttggctggatgatgatgttaggatgattacacaggacgacctttataaggttgcaagttcaaacctgttggattatcatcttaatcagttaaccagacagcgtgagtatcgctctctcttggacgacttaaagggaataggtgtagaggttgtcaaagatcctgaatacaaggaaaaggttaatatggctagtaccctttaccatgttaaaggttattatagtgcagaaagaactgcgaagagaatcgtcaatggacgtattcgtgttgggaaaagcctgattaacaaggtaaaagaacgttacccgttactgaagcacatcccgatggagcattttaactcaccagaggtggctgagtatcgtaaatttattgatagcaaaggagagaaataatgagtgatctttttaaatcccgtgcagatgctcgtgtttgtgctgcaagtcgtggtatgaaggttgtggaccgtggtgtatccccagcggtgctggcagaggggcgttggatggttgtccccaaagacagtattggtgcttccccggaaaagacgatttccttcgatatggaaacttaccctgcgccaactgcctctatgttctttgcgagtcggggagaggcccgagcattctctaagactgtacagaatgcgaagattatcgatcatgcaaagacaacagcaggacatgacaaagaggagggggttgtcaaggaccttggcaagcgtggtaagcgctgggaagtggtgttcgtagtttctgatgtagaagtgagcgttactgttcctcagcttccagaacctacacctgtgcctattaagatttcggttgttgatgacacgaaagctgaccccattgtcatcatgacaccaggcaacgtttccatcacacttcccgatgggaccattcatactctgggcagtaacagcgaaatctttaacgacgttggtatgttactgttaaacaacaagatcgacgaagccgtagcgcttattgaggcgggaatcgctgcaaaagctgaagtggcaatcgatcttggaccggatatgaagctgctggacggtattctgtactggcacggtatcaaacaagaaagcggtattgctcgacgtattgtttcggatatcgagaccgggaagttcgataaccgttatgttgagttcatgcgtaaactgatgctcaatccttcttacaaatcggttgaaatgctgtacgacttcctggagcataacaagtttgagattctggagaatggcaacatcttggcctacaaggggcttaagcgtactgagaatggtcctcgtgactggttcacaggcctggtccccaactgggctaacaccaccgtcacgatgccaagaaacatggttgaagatgacccaaccaaagcttgtagtcaagggctgcacatcgcttccaaggaatatgcccgcgattatggcaatgtggttgaggtgtctgttgacccggcagacattgttagcgtaccatataactacaataacaagaaatgccgatgctgccgctatcaagtattaacagggaaagaaaagccagcaggtgctcctgatgttattgttgtgggtgtaaggggtgctatcctggacgaaatttatctcgataaggaggattaatgtccttagtccacggacagggcattaatgatgccccttatcccacaacccggtacactcttgttggtggtaagagcacacaggcgtggaggtgcccgtactacaccctgtggcgtaaaatgttggaaagatgttactcagacaaagccctgaataaaaaaccgacctactccggggttgttgtggaagaggcgtggaaaacgttctctaatttcagagagtgggttgaatgtcaagatcaacacgttgcttggctcgaggaaagtgggaaaagaatagttgacaaggtgtataattttaatttagataaggacattcttgtacctgggtcaaaaatttacagttggaatacatctgtgcttgtaccttcttatctgaataaattttttctgttgcgggattcagctaggggggatttccccattggggtttcttggcattctgtggttaaaaaatttcaatcaagaagaagaggccagcatctggggtattttgatgacccgttcaaagcacatcaagcgtggcaaaatgctaagatcttggatataatagacattcatgatagatattcgcacagtggtgtttgcgaccacagagtctccgaaagattgcttatgatagtaaaaaacataaggcgagacttgcaatacggtatcgagacaaaaaatttattaggagggtaacttgagagaggattttggggtgggaacggaagaggccttaggtgctatcattgaaggcaaaaacgttttcattactgggccggggggcagtggcaagagccatctgatcaaaacaatccaatccctgtatccaagttcaacattaacagtggccccgacaggggtcgcttcacttaatgttgatggaatgacaactcatcgagctttcgggttatcaatggggatagccacagaagatgatggtaagacagtaaaaactaaacctaaaaaacttttaaaaagcaaatctcttgagcgtatcattattgatgaaatatctatggtgcgagccgacaaattgtgggaaatggatcagaaactacgtgttgcgagaagggagcctaagaaagctttcggcggtcttcaggtcatcatgtttggtgatttctttcagaatcctccagttctgacagattctgaagaaaacgcttacttcgaactccacagcacagaattgtcgtgtttctcagacacttggagagagataaatccataccctgtacttcttgacaagatttatcgtcaaaacagcgtgcatttttcatcgctattgaatcatatgaggaaaggcgagcgtattgatgaaatagttaaattcctcaacaatcagtgctattcaaaaggtgcagcactgaatgcgattaccctgacttcaactaatgccgcggcggaacgtatcaacaaaaagcattacgatcagataccgggtgaagaggttatttacaaagcctccaaaacaggagattttgcccagcgtccagtttctgagagtctacacctcaaggtagggactcgtgtcatgatcaccgttaatgatcagaatccagatgaagacggtcctaaatttgtaaacggaacacggggtattatcaaggccctaaggaagttttcggtagatgtagaactggaagacggcaaggttgtagagatcgaaaagaatgtctgggaaaatgttgaatacttcccaagaaaggttatcaagaatggtaagactgaagaggaattggaaaagattgttgttggaacatatacaaacttacccattcgccttggttatgcagtgaccattcacaaagctcaaggcttgactttgccagaggttaatatagactttggttatggagcttttgctcctgggatggcctatgttgcctttagcagggccacttctacaaaaggtttaagattgttgcgtccggttaaagaacgtgatattatcgtagaccaaagaattgttaaattctacaaagacacattcccaggaaaattttaggagaaaataatggcatcatattctcgtctggagctggtagaaaagttccgcaaagaacttgaagtatggaatcaatggcaggttcctcgctctgaaaaagctatggacactacccacatccaaatggcctctcttgacgagatgatgtctgcttatgggtatgtccctcgtcgtctttctaacttcccagaagttaaagatggtcgctttggctaccagcttgcattccctcgatgtaaaaagatttgtcgcccattctttatctcgttacaggatgcagttagcatccataatggcaatgggtacaaggggaatccattccgtaggttgggggatcgcatgagttttgctctacagaaccgtattgttgagcaggtggcggttcagagggacaagtctttggaaggtggtatcaaatcaactaagaagtggattaagttctatgaggagagcaaaaatgcaggttgaagacttcactgacctgagtaaggtaacaacagaaaagctaatgaaactccgtgatatcgctcaagattatcacgatgagatgcagcaagctgaactggaagcgtgggaaagactccaagatataattcatgaaattgtcaagagggcgaagaatgttcaaacgtctaattaactggctctttgccaaagaggatgaaaccacagaaaatgaagttcgggtatttgacttcacagaacaaggtcctggacatgatatcgctatacgagtcatcaatgatggtgaatacgcagaggcagtggttgccctgaaacttgcggatctgccgcctgcggttggtgacttcatcgtcgtagttttagatggtgtccacaatacttttgtggtagaaacttcagaaggtgtgagcctgactgttactaaattgaccctaactcgttatgaaggcgcagaagatgaaacatcgtgaaaatatttgtaagcttattgatgatttgaaacgcatcgcaagtcaagcaacaccgggtaagtggtggatagattcacatggtcatgctatggttgcattttcaacggaagatgctggcatggaaacagtgtttgtgacagacggaaatatgggtccggttgtgcgccatgagaacacaggtaatctttcggcttggcgcaatgatatggatgcaacatacattgcgactgcctgccctcagaatgtgctggcagttttggaatatctaagttctggtgctaacgcgtggaataccataagcacttatatggaaactcgcctgcatggtgatgcagccgctttacgtaatgatgtaagccggaagttgtttgatgacggttgtcatagtgcagcagtccatgcaattcagtttatcgaggcactcattgaccagaatattgaattaaaggccgaactggagtctaaatgatcaaagattgttttgggaatgaggcgagagttggcgacaagatcgccttctctcaaggcaatgctggagcaaaaaagtgggaattcggggagattacccggataaccgataagtgcatatattttcatggtcgcgccgggggaatgttccgtgactggcgtgatgataccgagcttcgccgtggagaaggcgcgttcgtaattaatttagaggcgagaggacttaatgagtaaagccgcacttcctgtagagatcgaattcagttatgaccaccctactgcgggtgtcgtcaccgtcgaagcactttattctgtgatggaaggcgaccgtaacagtcgtgaaagcgatgtagattacaacggtttccaagatttggagtattatgctgtattctctggaggcaaacagatctacgttgacattccagatgatgtcctataccatcatttacgcgagtatattcgcaatcttgaaattgtaggttgcttccaggaagaggaggagttttaatgaaacacgaagttaaagtcgtcgaattcgaattcaataaccacagtggtccaaattacgtggctaaagtgttggcagaacatcttgatgaaggatatactatcgcagggcaatctgaaagtgctagatatctgacctacactctagttaaaattatcccaatttccatgacgggtacggtaacaaatgccgatcaccaaggggtaagtttccactaagggaggcagtttgaagaagaaagtgatcattctttatgattacacttcggtcatggcgcgtccttggttagaggctggctatgaagtttggacttttgatggtcaacattcaccaggagtcacccgcgagggtgaccttgttaaagtcgggatgtggttcttccacgacaagaccgttcaacaagctcaagagatcaaagaaatggttggtgacaatgttcatatcgtctttggtttcccggaatgtactcacctgaccaatgcaggttcacgtcattgggctaagaaaagagcagcaaaccctaacttccagaaagaagcaatggaactttgcctattggtagagaaggttggagatttatataatgttccgtgggcctttgaaaaccctgtcggtgttctctcttcaatgtatcgaaaacctgattacatgtttgatcctaaggattacggcgggtatctcccaaccactgatatacacccactatatccgcacgtataccctcctcaggacgcgtataacaagaagacgtgcatttggatgggcaatggcgcaaaacagcctgacaagcttcctgtgaaggaattgtacaaggacaatccaggctggaagaagtgtggtggcaaatccaccaagactaaaaatattcgtagttgtacacctcgcggttttgcggaggcgttttaccagaaaaataaatgagagggataatgggaaatggaccggattgggcggcgtatcgcaaaggtggcaatgaaaacccaagagcaggttttggaagtaatcgcggaggcaagttgagttatagtaacaatcgagcagaagagaccctggaatcagtgctgtctggcacccgcatcatggctgttcccgaaatgagtctctctcttgaagcagcacagtattttaagatccgttctgcggtatccccggcggatggtatcaccccggtagcaacatacttgccctattatgataagtatgggaaactgacgggattcaagaaacgtgactggacgttacagaaggaaaagacaggacacttttcaactgttggtgctgtgaaggcatcatctcagttcttcgggcagcatgaagcctctatgggtgttggtcgtaagcagatcaatatcgtggaaggtgaaggtgacgtatgcgccgcatggcaggcagcgtatgagatggttaaggctatgtccaccagtccaaaggccagtaaaggcgttaaagactgggcggatagcatcttaaaaggtatccgtcatattcagaacgacgaggacattggaggtcttccgacactaccctatgtcggattaaactgtggtactgcaaacgctgttgatactttcgcaaacaacgagaagttcattcgcagttatgagaaggtagtcttgggctttgataacgacgaagccacagcattagaaaaagaaaagaaaataaagaaaggtaaagaagcaaccgacgatgtcgctagcttcctgctgtcagaaaacatttacgttgtgcgatatcctaacgagcgtaatgacccggatggctttaaagacattcgtgacatgtatgatgcgggtaaggtacgcgagctttatgcaatgtttaccaaagcagacgatcgctatgttcctgataagcttatcgggcttaaggatattaccattgagaatcttcgcaagaagaaaaaagatggtgttccattaccagggctacccggcctatataacctgacccgtggtccccgtactggtgagctttggacattgacaggcccgtctggtggtggtaagtctacaatctctcgtaagattgaatacgcgatcattgactatcttcgtgatatgtcaattccccgcctagatggctggaccgagagtgagaaagtagccatcatccgtctggaagaggatgaagaagagtctgtaaacagcttgtatgctgaagagctgaaggtggaccctaaggcatttgttgctgacccggagcagttcttaaccgaagagcaacaccttgagattcaccaacgctggattcgggaagataagattaagatctttgatcacttcggttctatcccgacagaccagcttattcagaaacttaagcagatggtgttccttgatggttgtaaatggatcatcctcgatcacctgtcaatggtaatctctggtcttaagtccgacaacgaacgtcgagaccttgataacatcatgaccgagctggcagctttctgtaagaagtacgatgttttcatcttatcaatcagccacatgaagcgtaaagaacttcagcttccgaaagataaagatgggaatctattgccgttctggtatccggtccgtaaagaagacctgcgcggttctgcggcccttgaacaactctcatgggtggttctgggtgttgaaccagaagagcttcctgaccgctcccgtggacgtgtacgtatcgtggtgctgaagaaccgcccacacaaaaaactgggtatcgctgatacaatggttatggatgacaacgggcagttctccgatgcttccggctgggaatgggaagatgggatgttcaagcttaatggtgaagttatgcttcgtcctcagagtctgatccatcaactctctctggaaactccggttggaaaggtaaatgttccggcacctgagtataagccaaccatcgatcttgataggacaccagtccctactcttggtcctgacgatgatacgcctttttccccgatagggttgcaatatgcaaaacatgcaatttatgtaatttaataccaactgagaggtgggcgacggtacagtctagtccaccttgcataggaggaatattgaaaaccgattttggaattggtaagcaacacgaatttagtgccgattttcttagagagctttttcatgtagacccatttacaggagtagcgacttggctaaaacgacctggtgaaactaaagaatgtaaaagatggaacacacgctacgcaggaaaacaggttggccatctgcataaatcaggatacctgagagttaaactccttggaaagacccatttgttgcatagacttatcttcacttggtatcatgacaaatcctgcatgtttattgaccacaaagataacaataggcttaacaatgccatcttcaatttacgcccttgtaataaaaagcaaaatgtccgtaactccaggctaaggatctccaacagctctggatacaaaaatgtctggttgcataagccgacaggaaagtggggagtttcagtgacaggagaccaaggtctggtttaccttggactgtatgttgaaaaggagactgctgcggctgtagctaaaaaagcaagacacctattacagggtgagtttgggagggatgtgtgaaaggtttgtatgtctatgacaatgaggcttcgggtctgctagaagaggaaaatctgtattaccactgcactctgtttaaagagtatgcaattgataactggattctttttttagatttttcccatcccgagcttgatgcggcgaaaaaattcatagaatcaaaaggccataacctgaagattcttgattataaagatttagaaaagtggctcaccactgtgcctagagctatcgcagcgcacaatgctttcggttatgaccttcgtttatggaaaaagctgtcaggcatcgattatgacatgttcaaagatccgaagtgcatggggacgatcggtggtaaacaggtaaatctctacgataccctctccatgagccgtgtgctttatccagaccgtccattgcctaatggctgtcctgattctgtgcttaacccggtgaccgggaagagagatcgtgtaggccctcatggcctgttagcctggggctaccgcgtagcaaataagaaagttcagatcgatgactggcgtaaccaacctctttgggagtatgtgagccgtgttcatgaagacgttctgatcaacgagttagtatggcaatccctgatcgatgaatctacaggtgctcgctggcctgatgacaagcagttcatgtacaaagataaaccggaagggatgcggcagatcaactggaagaacgcgctacgccgccgtatgttgactgattacctgatgattgagcaagaaattcagggtgttccattcaataagcatgaagctgaaaagctgagagaccgtattgatggaatgatgaaagagattgaggaagaagtagaacctcaactcccgctcaaagagatgacgaagtctcaacagccaaaattccctgctaatccttttgatggtgcaggaagaatttcccatcacgggtggaattggttagaatacaagctgggatatccagttaatcgtgaagcgctggaattcaaaggtccaccgaagacggcgtttaaaggtaacggtgatgtaagtgcagcaggggaaagatactgtatccagaatggtgttgaagacccggcagcgatgccagacttcattagaagccagataaagaaagagaatacccttgtcccattgccaccagacctaatggaaaaggcaattgccgatcttcgtgctggaaagatgccagacctgatggttccgatgaagatctcgaaccaggacgacatcaagaagtacctgatccgcgatgcgggatggaaaccaacgctctggcgtgttaaagatgtgacgaaagaccagttcaaaaagacccgcgatgatgcggaggttgatggtctggtgcgtaagtacatcgaagaacttggagagtccgagtataaatctctgattcttgagcacttaaataatagtgacgcaaagttcaatatctcggaaaacaagttcgaccatcgtcatggttctgatcgtgtttacgaggagatcttcaagaagttccgacgcaaagctcgtcaactgccgacttcaccacagttgaaggataactttggcaagctgtgtcctaaccttgaagttatcgatgttcacttggctaaacagattgttaagtggctgtcattacgtaaccgtcgttctgttctcgacccgattgacgaggacaaaaacgacacagggctgttgaatcaccctcgcctggcgattgatggaaaacttccagctcgtttctccggcatcaccaataccgggcgctgtaagcacaccatttgtgcaaacatgcctaagccagatcctaaggtgttattgggtaaagagatgcgcagcttgtggacagttccagaaggttattatctgatgggttgtgacggttctaacttggaaggtatgatcgctgctgccggggcttttgaatttgatggtggtgaatatcttcgcatcatgatggaagaggatgctcatgaacgaaatgctagagcatatacccttgcggcaggaaaggaagtcacacgatcaggggggaaaggtataacctatgggatcatgtatggtgctcaggccgcaaagatttcatcgatgctagatatctctcttgacaaggcacaggctgtaatcgatgctttctgggatagtaactttggtttgaaaggtcgtaaagagtggcttgaaaacttctgggaagcaactggtaaacgttatatcccaggcctcgatggtcgtaagatttggacccgttctaagcactctcttttgaatgcttatcagcagaatggtggtgcatctctttttgacttagttggcgttctcttccattgggaaatcgttaagagaggatggtatgatgaaggtgttaggagactaatatactaccatgatgaaatccaggtacaagtaccagaaaaattcaaaaaagtgacagaatattcttccttagaggcggcgcaggaatatgttgacaaaatgctcgaaaaagggcattgttttgatgggcattatgtcaaagctgggaaggtgattgtagaacctgacgagaatggtaagtacaagatcttacattgccctgtcggagagcttgctaccaaatgtgtagaaaaagcttctcgaattatgaacctcccagtattaattacaggagaatatctttgtggatatacgtgggcagattcgcactaaaatccttactcaagacttcctaagggaagtctttacttacgattttgaaaacgggggtctgatatggaagaggaaggctgatgattgtcaagaaaatagaagatggaatacaagatatgctggaaaacatgcaggtagcccgaataatcaaggctatctccatgttaagctaggagggagaaaatacaaacttcacaggcttgtattcttatacatgcatggttacttgccaaagatagtcgaccataaggataatgacctccagaacaaccgtatcgagaacttaagggcggcagatcatcagaaaaacaattataattgtaggatctcctctgcaaacaccagcgggattaaaggtgtgagttggcacaagcagcataaaaaatggtacgctacgataagagttaatggcaaagccgtctttttgggaatttttgataaaaaatccgatgctgaggaacgtgtgaaagctgcaagggaagagcttcatggggagttttcaaacaatggataattttttcttgacacccgtctctaatagcattaaattgtatcacatgaagacgagagacctcgcttcaaaataacttcacaaacaggagaacgaaatgaccgcaaaatatgaaaccgtaccttacgctgacttcgtaaaagctctgaaagctcagttcgctgtcatgcaagcgctgggtgcgctttacacggtcgatgtaccgaaagatgaactgtacgatctgtacctcgactctttcccggaaggcaccaatctgatgtataaagagcgccgtgaatatgactgtaactgctgcaagagctacatccgtactctgggccgagtagtcgcgattcacaacggcaagctggtctctatttgggacgttaaagttggtggttactaccaagttgttgccgatgcgatgaaagcgcgtgttgaaagctccgagatccgcgatcgcttcttccactttgaaggccgcgttggtactgagagcaacgtagctctgctggaaaatgggaaaaccaaaacctggacccacttccatcaggccctgcctcgcgagctggttaaacgtggtgaagatatcccttcggccctaggtgagtaccgtgacaacgcaactgtgctggcacgttctctgaaagatatcgatatggactctgccgaaacggtaatggacctgatcaaccaaggctctctgtaccgtggtgatgagaaaaagcacattgttgctgcctttattaaggcgaaacgtgcatacgacaaaacgccggaagatcagcgaatgaacttctgctggaaacaaagtgaaacgctgggtaaactgggccgcttccgtaatgatgtcatcggtacactgatgagcgatctggcagaaggtgttgaccttgaggccgcagtgaagtccttcgaagacaaagtctcagggaccaactacaagcgcactacagctctggtaactccaggcatgatcaaggcagcacaagagaaggttgaagccctcggcttgactgagtctctggcacgtcgctttgcggtgacctctgacctgacgatcaacaacgtgttgtttgctgaccgttctgcaaaggcccagatgaacgtattcgagcaactggcagcgtcaaccaaaaacgcgccgaagtcactgtcgaaagtagaagagatcagcattgaggatttcatcaacaacgtcctaccgaaagcggacactatcgaggcgctggttgaaggtcgtctgacaccgaatctgatgagcttggttgccccggcaaacgcaggtgctcctaacctgttcaaatgggataacggcttctcctggtcgtataatggcgaagtagctgactccatcaaggagcgtgtgaaagccgctggcggtagcgttactggtgacctgcgtgtttcgttgtcttggtacaacagtgatgacctcgacctgcacgtattcgagccgggtggtggtcaaatttacttcggtcacaaacgtggtcgctcaacgggtacgctggatgtggatatgaatgcctatggcaagtcagacgcacaccatccggttgagaacgttacgtgggaaaatgagcgtaatatcacggaaggtgtttacaaggttgttgttaacaactataataagcgcatgactgatcgcgttggcttcgaagtccagatggaatacaaaggccaagtgttcaacttcgcatacccgcaagctttgggtaatagcaagagccagaccgttgtaacctttaagtattctcgtgcgaaaggtgttgaaattgtagacagcatcgggcatactaagcaatctaaagaagtatggggcgtctctaccgagaccttccagaaagtttctctggtgctgaattctcctaacttctgggatggtcagaccaaaggtaacaaacactacttctttatgctggaaggttgcattaaccctgacgatacccgtggcttctacaatgagtatctgcgtgacgagctgcatgagcatcgtaaagtgttcgaagtgttgggttccaagctcaaagctgaacactccgctgatcaactgagcggcctgggcttctcgtctacccagcgtaatgagttggttgtgaaggtgactggttctttcaaccgcaccctgaagattaaattctgatgaaaacggggttgcaaccaaccccggtaactgatagactcattgcatgtctggaggggttagctcctccagaaaatccttaccaaaggatatgcaatgagttcgggtgtgcgtacataactgcaaagaagatgttgcactccttcacttaccgggcaacagaagcacaattagtcgcgattcttgaagaacgcggcatcttaaaaaactaaagaggagaaacaaaacaatggctatcatcaacgcaccgaccctgttcgaactggctacccgtcaaaaactgcgtttcgcaagcccgaaaggtctactgaccacagaagatctgtgggatctgccgatgaccggtaataccagcctggatacggtttccaaactggctaaccgtgatgtgaaagcatctgctgaagaaagtttcgttgtcgaggccagtgctgtaaatggcgaagcaaacctgaagctggatatcctgaagtacatcatctcggtgcgtaaagctgagatcgcggatagccaggcagcgaaagagaaggttgagcgtaagcgtaaacttctggacctgctggcagagaaggataacgagaaagatgcagcgatgactcgtgaagagatcctgaaagagctggaatctctgtaatctgcccgccaaggcccttcggggcctttttgtattggaggataaatgaaagtaactggcaaacaaactattgtacagaatgtggaagtagatatctctgatgaagagatcatgaatattgtcaaggcacaaacaccagactacctcgcagatatcctcaccaaagaactgctgaggaacttcatctatagcttgccagcagattttactggtgagcgggccgtgtgggaaacacgtaaaagaggatatgaacagtttcttgtacttgtccatgtagacgcttggtgggactaccacaacaatgttggtgtggatgaagaagtcagaccgctcaccgaagaagaaacggcaaaatataatatgatttgcggtttgcgggactacattaaggagctgcaaaaataattcaaaagccccttgacttcatggttgaggggctttattgttaagtggctaccaccaacaggagaaaaaaatgaaacgtacccttggttttcaaaaagacgataccattttcaaaagtgaagaattcaccttgtttaatgaattcactgaagagcttccagctgttaaagtatttgaatacgcaaaagaaattcagaaaaactgtcatgaagatcagtatcctcaagcatggactgccgcacttagaggcgctcgtactggtttagatgagtgggaggaaagtggtgcgactggggaatatgagactttcttggatgatggtatcattactgagctatatgctttcttgctagaacagaatggtggtgtataatgcgtggatttatgccttgggtgaaacctttagtgatcgttggaataattgtggtagtggcgctttttgttgttgacacagcagataccgtcactcataattgcaagcctaacggtgagcaacgccttgctaactcggttgatggtgttatcgttgagaacaaactgatctgcgacggtggtcgagtgaagtggtctcgctactaaattctgactaaataatctcaagaggagattcaaatgaaaaagattatcctagccgccctgctcgcgctttcttgctctgcacaagcaacagagttttatcctgaagcaaacccgaatgatattaacgagtccgttgatagtgaactggcaaagtccctactgaaacgcgacacccttgaattgaaaattaaaatcgcagagcttgaagtggaacttgccaaaatgaagaagactcaagttctatacagcattgcccttgaatcaatggagaaaaacaaatgacgattactcgcggccttatcttcggtaagtttgcacccctgaccaacgggcatattgcctttattcgtcaggcggcacaacaggttagtgctctgtatctgttcctgtcctatgaccagaaattcgttgacgcacaaccagaatggattcgtccaaagttgggtcttgctgatcgctatcgtgacctgctggatgttattgccgatgagggcttggaaaacgtgaaggttgactacgttgatgagtcgaatatcccaggataccctgaaggcagtgctgcctatgcaaaactgatccgtgaaaagcaaccgttcgttaagtacgattttgctttctcttctgagccggagtatgagtcttacttcagtgagttcttccctgaagcgaagcatgtagttatcgacgcagaacgtaaagctgttcctatctcagccacgatgatccgtaatgacccgtacaacaacttctacaacctagcgtggcctgcacgtaagcgcttcatgaagaaggttgccatcattggtgttgagagtacgggtaagaccaccctgacacgacatctggcgcataccttcgatgctggttggattccagaggtcgggcggcttatctgtgagcgtgaatatcactccagtgagttagcaatgtctcgtggagactatcttcgtgtcgcaatggagcatcgcctgaaggagatggagttagctggttggggtggttgtggagttatgttctctgacaccacaaacctgatcacccatttctctggtatttgtgcagacaagatcgactactccgatcttctgttccgcacactgagccgtgaagagagctacaacttctacgacctattcctgttcctaacaccagaggtcccgtgggttgctgatcctcttcgcttgcaggatacgccagaaaagcgtaaagaaacacattctttgcttgacacaatgatcagagcatcttacgatacaagcaagtggtggttatctccggcagtgattacaaagaacgtactcagaaagccgaagaagctgtccgtaaattgctgaatataaaaggagaataagatggatgttacaaactcaagtatgtaccaagcgtttggtgtattaaagctcgtccttgaaaaagctccagagttaggccagggcctccaggcctatgcgaactgccgtgagcagggcttctccatcatgaagttggactactcaggtgggcaagataattgtcgtcaagtgtcattctctgaatgccgaaacagtgaccagatcactgtgtactatgggtcaacacgggacttcaatttccaaaccaacatccctacggacgatacctatttcaatcgccggaaattctttggttatgaggggttcgaagaagcggcagactggatcatcgcatatctgaaaggtgataaagatggagcaaactaagccgaccctggtctggaaaacccaggagggttttgatatgcgaattagccacatgtctgatgagcatattgttaacgctataaactggttgctggtagaacctgggacagatgacccttctgacctgctggatacttatctgcaagtccctatcgttatctggattcgcgagttgactcaggagttgtaccgtcgcctacatccggaactggtcaatggctaaggtactcaacttctaccacatcggtaaagtgatccctgaaggtgctgaatacatggggcgagcaatgccccacttgggcctgaagcaatctaaattcgctaacccatataagttgtcgaaggatgagcctcgcggggcaacgattgagcgctatcgcgtatggttatggcaacagatccgtgctgggaaaattactattcaagatcttcttgacttggatggtaaagaccttgtatgcttctgtaaacagccgaacaaagaggtagcatgtcactgtgatgtgatacttgcggcaatcgaatgggcaaaacagaggagtcaaaatgtctaaagaatttatgggctggtttgataaaaacgcacccgcacatctttttccagatgcagaggagcgtgaaaacctacaagtgatgtgttggttagcatggcgagatgggatcaggtctgtcttaccagttgtaatggagggttaaaaatggcaattcatgcaaagagtaatggtctgctgatcggcggtaagatcatcgaggagacactgacaggctgggttttccaggcaatggataacaaaggtactaattttgtgttcaagtcagatgagaagaaccaagtttttgacggaccgaatgctgttgacgaagcaatggcttggcaaactaaagttcggtcagaaatgaaaaataaaaagaaaaaggggcgcaaaaatggctaaagatacatgggaagtatttcaggatgacgatgaaataaaggtcattgtctcaggctctcttgaggtaggttccgggtggcgatcttacagtgacgtgtgttcagagattaataaccttgatgatgccaaactcattgccgcagcacctgaattgcttgacgcggttctggatctgaagtataagttatacggtaacggcgcggcgaatcctaaaatcgaagcgcttcttaaacgattaacaggagaataaccatgaatacaaatctgtacattaagacagcatggaccgacttttatggttggtcaaaacttgaatatctttggctcctcatctgctcggcatcgatcgccattgtctccttgactatgggcggtgggttagtagagttcatctcttctgttaccgggatcatcggagctatcctggtggcaaaaggtaagctctccagttattactggggctttgtggcaacggtgctgtatgcatatatctccttcacgtacaagttgtacggtgagacgattatgtacaccctgttgttcacccccatgcaggtcattggtgggataatctgggcgcgtaagttaaccgtctctgaggatggtgaacgtgcggatgtcatcaagaagtatctgaccacaaaacagcgctggattgttggtatcgggacattggtgacgatcggattatacgccgagttcgttagcctgctgaaagggagtatgccgggtctcgattctgctacagcaatcctgtcggttctggcaacctacctgatgatggttcgttatgcagaacaatggtatgtctggattattgttaacgtggttgctgtggctctgtggattcagacagcaatgcatcatgaaacacaaggatgggcagttcttgcaatgtgggtaactttcctgttaaactctgtgtacggtgcttacaaatggcgtaaaacagaaaaggaaactacacatgcgtgatttaatcattcccacaaccatcagtgtagtggtgttcttctttgtgcttgcaatatctatctctctcggatactatgttggtatcagtgcgggagaagtattcggaacacctggctttggcgagtacgcccaaacctctgtaatacttgggggtttttgggattagttctcggcatagtatctttcggcataagttcaggggtggagtgagtgtgaaaagaacaaagcatatcaataagaatgctttccgcaaggtggggcgttatgccctgccattcgcggtggcaatcacagttgcaggttgtgagcaagcagacattgacatgaagatgtacaaaaatgttgatgagtgtattgcagatactcacaaaccggatcagtgtcgggcagcaagacaagaagcagaaaaggttgcaaatgaaactgcaccacgctatgcgacttattctgactgctacgcggagttcggtgaccagtgccaccacaatccaagcagctcagatagcggttcttcgtggatgccgttgatgatgggatacatgatgggtaacagcatgaattccggttatcattcagcaccgctatatcagaatcgattaggtcagtatatggacaataaattccgtaactacaatgcacgacctggtcaaacgttcaaggtgacaagctctgcggcaaagccaacagtacagtctcctcgtacaacggtttctcgtagcaccacatcctctcgtggtggttttggcagctctgttagcagtcgctcatcttttggagggtagttgatgattggattctgggaatggtttacaatgaatcacaattgggtatctagcctgatcccgcttgctatgttttcctacataggatggttattgtcgggagggcttacttggaagggaaaagtggcctcctatgtgttttcagccgtaatgtttggggcaatgttctgggcagtgacttacttgggtggttatggaatgtataagcgccattatactacttgcgcaaagccagaagctgtggcatcattctatgtgtttgatgcaaagaaagagcgctgttataaacctgttgttggatttgcacctgttgatgataatcaggtaaagactctgacaccgaaacaaatggagactggagaatggctttaactcgtgaagaacgtaccggggctaagtttgtagagatgtatgaggcccgtgtcggttcgaaacccactcttgaagagcaactgatgcttgcatacttcaaggagaacgtggatgatctcccggttgactggggcgacccaacatctttccacaaagcgttcagacaaactgacgtttgtcgtcaaggataccaggatatggtcatttggagtcttatgtctggtgggccaagtgtagcaatttgggatgtattggaggaattttatgctggtcgatgaacttggtgttcgtagccttgtcccagatgcttgggcagaggcctatggtaagccacaagctgatcctcattctgttttcgcagagctgcttggtgtaacacgacagcaagcgaaggtagtcggttatgagtatatgtactctgaagagaccgaacatgttcgggcgatcaaactgtggcacctatcgggaaaagaaactcgatatgtttaccggaagcttgctaacctcttgttggagaatggggttactgttcctccgctgagagaaattcttgaggaggtagatcggaatgaataaaatccgaaaatttttcaaatggttattggggttattcagtacaccaacggtcgtatctatagggaagggaaacagcacttttgttagccaaacaaccaaggtgaccacaatatcttctgaagagcttaatgagacgctcaacgaggcccttcgtcaagcaagacaaaacaatgagcgtagattgaaaatgtcacccccaacgccaccttcaccgcctaaaaggcgtgtggtcgtggaggatggcggttatcgccggagaaatgatgatgcggcgatcatcaatacaaccacgattagtgatacgtatacccatcatacgccaagtcactcgtcaagtagtcatgactcgtattcctcctgtgattcgagttcatcattttcaggtagttgtgattaaggagataaaatgaaaattggtttcttaggtcttttggcgttggtatttatcacgcttaaactgtgcggcgtgatcgcctggtcgtggtggcttgttttactaccgctctacttcggtgttgccgttcttcttttcttcttcctgatggcgattatcgggtggctgggactggcaagtgtaggccgtgtggctgaaatgatgtcaagttcaaaaaagaaaagaaagtaattgacataacaagtgtaaaggggtaagataccccttcactaataaatggaggattgatgactgaagaagtaacccctaccaacgaagcacgcttcctgggactagaccccaatcagttcggaactgtgattttcctctcaagtgccagcgttcagatggctgaccatataaattctgaacccgtcagaaaagaaatggaacgtttgatcagtgaaggcaaacacgaaactatcgaaacggcgttggcctggattcgtggtcagcgtaatgctgtgatgcaactgagtggagcttcaaccttcgcgcaaaatcttttggcgcaagttgaagatatgttggttgatcaacttcttgctgtaccagttacacaagtcgttgaagaaaaatctgagtaataaaggagagaagatgagcgtagtaaacgaatacaaagacccaatgtccggcaaagtaaaccacttcgcaaaaggtagcatcaaatacatcagcatcaaacctgtgaagaatgctgatcaagatggcattaagcgtacccatatccctgcacgtaacggtcaacctgctaaggtgattgaagccacccacactatcagctttttaatgcaggaagttgatgcggataataacgtggtagacccacagagccaaggtgaatggatcggtatgggtgagaagaaacttcacgccagccacacggataaggttcaggtcaagtttgattccggttataaagatattctggctggcatggttgtatctttcccgctgaaagtctctaagaatggggataaaacctatatcaacggcactttaagcggtaagacattcaacattctggatgaaagcaaagctggtcaagctgcacctcgtcagcagcagtcttctgccccagcagcacagtcaggcggtggtgttaagatctacggtgagattaccgaaatcgtaggtaatctggcgactgttaatgacgagaagaacggccccggcggtgtagttctttccgatgaacaactggcacaggtatctgttggtggacgaatgactgcctttgtggatatgtctaacggtaacatcctgaatggattcaaagcttacggccccgcaggtcagaacaacggcggttctggtggtaaaaagagtggtgggtacgaccaatttggtgttgaaacaggacacgccattaacggtctgaaagagttgatgggtgctggttataaagtgaaggatgagttggagacagctaaagccattcaccgtgccacattggatatgaaagcgttcgttgcggagcgtactggtaagccagtcgattccaacccggtcggtgcaagtgcgggcaacgcaattctggttgcatgtagccgtttcaatgctaagtcagatgtttctgaagcaacgattctggacgcagccaaggacgtgtatacaaagctctctgagccgctttacacgtttattagtgaaagtgccaagggtgccgatcaaactccgtcacagcccgtccaggagcgtttaacgacacctcctgcccaagatactccggctatggattttgatgagccgccgatggactgggacgaagaaataccgttttgataatgaaaagatgttctaattgtggggctgaaaagccccttgaacaatttcagatcaggagggcttctaaggatggatataccgcatcttgcaagctttgtcttaaggaacgcgaccgaatcagggaccaagatcctgaacgtaaagcaatgaaagaacggtacgttaaaggtatcggaagagaagcggcagcacgagcaaagaggaagtatatcgagaagaatccgaagaagagatctgtgcatataaaaacaggtaatgcgatccgtgacggcaagatatttaaacagccttgtgaagtttgcggaagtgaaaatgtacaagctcatcattgtgattacgataaacctttagaggttatgtggctatgtcctattcatcatgaagagtggcacaggcaatacggcgaagcaaagaacgccgtataaaagaaaaggctcccaaatgggagccttttttattacggtctttgatagacagctacatcatatacagtccctcttccacaataggttacttgtagaattgtaactgaatttgcagcagtgctgatcgtaccaccatttatgattttataagatgcatcaagggtgacggcatgtccaccagttgcatcctggaacagatagatcgtggcagtaaaagcactaccaagatttgcccaaggtccgatagttaaagtatttgtcacatctacgttgtagatgttattcatcttcgttagatcggagcctgtccctcccggtgtccaagttgtccctgcggaaggtgtggtaacagaaccggggattgttcctacgaaattcgcagtgaccttcggagccgttgcttcacctgtaataacgagggatgcaccttttagagatccgtatgcctctattgtggtggttgccagaacggagttagggttaatgtccttcccattgacatcaatggagacacctgtcagagtcccaagtacgttaaggttgtttacggttgttgtgcctgtcccgccattattcaggttggcgtttccagtaactgtaaggttggtgcttaccgtagcttccccagtaactgcaagcaggcctgtgatggagagatttcctgcaacagagctagcagtcccggctgtaaatcccccagttaatgtgctgtttccattgactgttaatgaacttactacgcctaaattctgaatagaggcacttccgagagttgttacaccgtctacggttaggtctgaccctatctgggctgttgtcgttgtgataatagagttggggtgaatgtctaagccatcaacaccaacattcacacctgacaacgaacccgttactcttacgttttcaagttctgtcgttccggttaccttaagccttggttccgtagaggccttggaagagtttcctcggatatacacatagtcgaaggtgttattaccgacaccagttaatgacattgtggtgttatctgcactagctgtcccattcacaataactgcggaagtcagattattggtttgaacagagttcggagatatgatagtcttcagatagttagaggcagcggtgtaatcaaaagaaagcgtggcagtttgtccaaataaagaaattttctggaatttaccaagcacaccagaggcatcaatcgtcccaccaaattgtgatgtccccgaaacaaccaatgtgttaagggttgaagcaccaactaccgtaagagcagcataacttggagaagaccccgtaagagagttgatcgccgttgcgacagccaagttgacaaatgcagttgtcgctattgcaccactattacttccctgagccggggtaggcgctgtcggagaaccgacaaatgcgggggtgttaagaggtgcaaatttttcagaaactacaacggagtcattgtaaactttccaagcggtacttgtagacggatcagcaggtaaggttacaggtgtagatggtgacgcaccaggagcgtaccaccagaacgtccctgctgaattggtgaaggaatatagttgattaaaaactgtcgcctgtgtccccgcagcccaaggttgtggtggtgttttaaaatacacattatcaagaagcgctttgcgtaatgttggaatcgtactaccgtcttctacaataacagtgtcgatggcagatccgttgaccaccttatggagacgctcagaatcctcgacaacctgatccacagcctgttcaaattgtgttgtatcagccatttaaggtctccttatttaatttcttgtttatcttcatcttccgctgcctttatagctaagccccagcgaagtgagattagcttgcttataagttgtggagctgctacagtaggtgcatatacccacatataccattctgtaagggttcctttaaatccccaatacaggaaaacagcagtcatggatgccagacctatattgctccaaaacttggtatgtgaggccttatcagggtctataggggacctgactaagtcctttaggaacttcattattcgagttggcattttacctcggggatcaatgagtgaagaatggtaatgccctggcaagcaccaacaggcttatgacagttgcagtttttatccattcctttatcgtcgtgtctttaaaatttgcacaaagtatgataatttccatccaagtttggtaggaagaatttattacaaaatcaaagagtccggggattattaacggaaactgcatggatattatctggcagaagagaattggtactgctacagagagtgttagctttttcttccatcccgataatatacacgcagcaccaaagataaaagagatatccaggaaccaacaaagattaaggtaaagggatagatcgaaaaactgggtgtttgaagaaaaccaccataggagggtattctcaagaaagatatggaccatgccaaaaacggacatgatccttatacctttgtcagaatgaaacaacaaaataataaagcacagaaaatagaagactgagcttatcattttgcggatctttccattaacatctggaattgcttggtgaggtctgttcttaaatcaccaacatctcccttgatgtcccttctaagatcggaaacatcatccctaatcgcttttagctttttatccaagatatcatccagcttttctttagtgaccatttcggcccttatacggatgatatctttatcaagctcatcaaggcgctcttgagtctttttgtaatccgagtacgttattcttaggactccgatcaggacaaaggtaataaccccccagaccgccttcaggatagcaaacaggtcaatagacatagtgcccccttaggctgtctgcggaagctctggttgagggtctcccttggtccatcctctgagatcgatgatatatttcttcattgtctcaaccttgtcttcttcacccagtgcagcgtaagttgatagcagtatcgcggccctttggaaaagtccttgtttcttattttcaaagattctgtcttccatccaatccactttttcgaactcttcaccgttaaagatatgagttctattagagaaatcacttggaagagaatctacaaaacgaaagtaacaatcttcggggaagaatttagttgggtcagtatctgccatatagacctgtccgttagaatcatattgaatatagaggcctttttgtttattttttagttgagacaaaaaatcgtaccaatcttgaccgttctcatcttttagatataaggctccaggaactgcaaccttttctggagaatatctaacccatttcatatcagttattttcattaaagccccactgtataccaaatgccatcaagagctttctgtaaaaatcggaatcttatctcatcaatatcgtgtagataaaggtctccactggcgtttgcatcaatcaggccagtcaatacagaaccatcaggtccacgcgccaaacgtccgcttgaaccataattttcaaagtcaacttgaactttgttttgctccccgctccagcgaatgtcagaaacaccaatactgatagaaacgtcaccattggcgtttgcagctgtgctgtttactgcacgaacaatggatcttccaccaacagttgcgttgttggagtttactacgaggttttgtaacgtagctgtaccaccaacaccaaggctggttgtctgaatattaccaccattattaatggttgtcgatgccaaggttcctgttgtcatcgtacctgtggctgtgatattgccctggacccttaacagcgcggtgtttgtaccagttgcattaagctccatcatggtgaatgtggaggaaatgtctgtaggagagaagcggaagcgaatagaatccacagtcgcactgcctgctgttccgctattatcaccgatcacaaaatcaagcatggtaatgtcattgccaagcgttgtggtgatgtaagcggaatctgatgtgccaacaggaaaattaatccttggcactgtcaatggccctgtcattgtgtcgccatcgacgttcacatatctggcatcactttcacttttgctataaacatccagattgcttctcgctgttgagatatcagacacatcgctaaggttctgatcttttctcagataatcattagagagtcctgggatctgctcttctgagatgtacgtcatccaccaggtcatcatgttaagaacatagttaagttcttcacaagcgggtttctcacccaaatcccaacccttatcccaaagatcagcgataggggagattttatttgcagtatgagcattaggtaacacgacgtcactttcagcccatatctgaagaggaatagtaggaattgccatgattctcccttataatagtgtgttctcttcttcggaggtatagataagactggagaggccaccaggccctgttcgcgatgtgcttacagacccaaaaccgattgcataggaatcgtttttaaacccaaaaggtagcccttctgattttaccagtcgaaggtacgtaggcatagggagcatatcttttatttcttgtatagcggtttctatctcgaaacagctattaaagatattgatatcaaaacgataattatcacctttgtaagtggtaaaattttcggctccgaagagttgtttcagtgtcccaattacctcaggtctggtcccgtgtttagctgtgcttgagagaagaattgtgataatggcacgataattcatatcactcaagccatttctgtcaatccctacttgagcaccaatctcatccaagttgactcccccagcattctggaggagacgcccttctgcaagattgaccatcatctcatctacggccttcattcgctccaaatacacggataaaaattttacaagattttccttttcccgtaaaaagtcgcccggcaggtagtcaataccgtccgaaacgaaatcatccaatggatggatgtggttgacatcttttatcgtatctgccataatccctcttagattatctgtaggaatgtaatattatcagtgtcgatagagaatacctcatccatccctgcaacaacatcagaggttgtataagaagtatcaggatctccgacgttcttgacatccacataaagttgtgtgaatctaccagcagagatagaagaacctacagcagatacaagctggatattgtataaagtgtcagcaatgttaagcgggtcaataacacctttgagggcggactttatagtatcctgttcagtggttgagaggacctttcctttataacggacacggatagccaaatcccgtgcctgtgctttactgtgataaattcgttctgtctgattatcctcagtagggacatcataaaaaacattaccataggtagcgttagacaaagcaattgaattataaagtgccttgctaatatcttcagtagacccaccatacaccacggtctcaaacttatacggtggtattccattctggtctgtagcccctgtgttatttgagaagattttaaccttacttacaccactcaccccaaggatagcactcaccaccgcaggtctggtcgcagccgcactcgatgctgttgtgttagaagccctgaccttgtattcggtgtcggtctcaacatctgtaccctctgtgaaggcattcatgttgttaaggctgatgaacccacccggtgttggggaaatcgaggttacggtgtttttctctctcgacagttcacctgcctcaacagcaacaacatccattgtgattgtacgttcaccaacaattggcgatgtcctgaaatcaacacggctattaaggccgatcatttcaagattagtatcatacccaatgtacaatgccccgttttgagagtcaatgatgatcctatcattattaagctcggaggtattgttgacaataaagctcttgacagaggccatgaaagtgttaagctgagagctattaggggttttattggtcaattgaagagttgtttgacttgttgttccggtgttttgattattgatctggaaactataagtacctacaacccagtccttattgagaattttttgtgctagtatgttaccagcaagggtggtgtcgtcatttaatacaaatgtaccactatcaagtgtatatgtgttttgggcatataccatgttgtaagggacagtgttgttaactgccatctcaacagaacctgaactttttgtctttcctcgacgataaacaccccttcgggaaagaagttcgtcaagataaataccctcagcccccgcaagggtctgggcagaatagacggacgctgccagaaggataatctggtattctctctcgttaaagatggttgtcaacttgtcagcaattgtgttagcttgtgtgttgaaattttcgccgaaagttctaatgagggtctgttttgtatctgcgataaggtcatcaagagaggggatagtgaaaccgtaatcgctcaatccgtattgagttgccaattcgtcctcctttcaggaccatgattcttttgtatattttaccatacgtggcagtgttttgcaaataaacggaggtaaggtataaatgaaaaaaccaccccgaaggatggttagtcaccggacaaagaatattccaaagctgaaagtcgcttgtcaagatcctcttgcaccgctattgttgcccgtaatatccagaacagcaattcctcttttctaaaggcgtattcctcgcctgctggcctatcagcatctgcctcccacttatcgtagcagaatgctgaatatttggtccaatcgaggccatactttagcattaccctcatagcatcctgaacggtagggccagaatgaagtcttgcggcacctttctccaatgagtatttagccaaccattgccaaaccgaatctaatttcccaatctcataaaaagccttggtctctgcgagagagatctggcgaagattagttttctttttcttgttggaggtagagattacgctgtttactgcgtaaacttgactccaccttaggttagtagtaccattagatatcagattgtctgtttttggagagaatgcggctgaaggggcagatatttgaattccataagttctctgagaaggacttaaggaaagcgtggttacattagcaccaatctcattccctgaagaagagaaataataattaccagatacattttgtaaactgttcgaaagactgtcaagagcttgttgaacagttgcccctgagtgtgtccctacaacagaggcccctgaggaccctgttatctcacccctcttaaggataccaatatctgcgattaattttcctattgtagttttttcagtgtctgtggaggactggatgattagctcatcggtctccaacaccgaagatctgtcagaaagactttttatctttatcacagagagatccgttgttgccatattttaccctcatctccttagatatgactgtcgaagcacgacctgccccgagaaatactggtttcacacatagcagttttttcacgagagcagatcaatgctaattttagctatcaatgaccgggcatccccggcacggatttaaattatctcataaacatcggtagccacacgttgcaggagtggagttgtgcttccagcagacagggtagcgtcggcattcactgagcatgtcgccaggaatgtagctggcggcgttcctgtgaatgcgatataggttgtgtgcaagtatccagaaaattgcaccctaccctgcacgccaggcacaatgttttccagtgcaatccccgcgatagttgacctggaatcgctattagttgcccttctcccgttgatttttgagccattgaacgctaccgcggtgcccttcaaaataaccacgctactggtattcgttagcagcatttcccgatcctcctggaacaccggagcggcattattgtaaggcgttataacgctgaaagaacgacctgaagtatcattaagcagcgcgttcagcgccgacacaacagcatcgttggtcattgctgtgtaattggccgctaaagtcagcgtgaccggagttccgccatcaaacacgatcgtcagcgttttgttaaccgtcgtacagtctccaagccgctggccaatgagtccaccaggaatcgtccccttaactgaatgcgagctatacacgcgagccgggaacccagaaccgcctgcaataatgaccggattatagccaaacagcgccgggacagctgaaccactaactgcaacggaactggcagcgccgtcgatgctgattaactgcaaaacgcgagagtcattcgtcgatttaacagcaatgggtgtacagtttctgatatgaatctggaattcagagttacgattcccccaatcattaaccagtttttccgccttctgcgtgttgctatcaatgctggtaatgccttgcaacgtgacgccatcaataatgcaggtatttacctgaccacttcccatattctgtacagcaagagccgaaccaccatttttattttcaaacttacccccagtaactttaattttgcacggcaaatcaaagtccttattggtatgaaaataaaatggagacgtctggctgataaaattggtattaacagcgttaatctgttcacctgaatgcagtccgcaaccccacgcatgataagcagaccaaaccgtcacgccgcttccgatagaatcctgataagcctgcgccccagcattgccataatgctcaacatcacactcctcaacatcaagtaccgcgtttttgattgaggcgtcaggataagcaagagaatcgctgtgtacaggatagcgcatattctttgcagttattctcaggttacggatgcgagacgtatcattcatccagaatgtttgggttagagggatttccgccgggtccacagtatctggcagctctcctttaaaccagatattatccctctgaccaaaaccgataatatccacatacttaggtatgacagtgtttaagtctgtataaattccttcatatacagcatataaaatgcgtgatttatcagttgcccctccaccatgagcagcaattgctgttttcaatgacgtgtaatcgccagtaccatccggcttaatcgtgtaaatcgccgaatagctggcagatcctgataatgcagagataatatccgatttcagcacagattcgcgtaagctggacatctggtcgcccagcgtatctcccagcgtcacgacgtccaaaagatcggctcgcatgtctaccagcttaaagtagccagcactggttcgcaccgtggtggatttcaactggataaacggggcgaaggtggtttcattacccgtaagaacgtatgtaacctcaccacgcattaaatttgatgtaatttttgttacggtattaaatgcagccgcatagttagtcgtaccagatggcgtgataactcgcaggtttaccgtaggtgttgtttcggtagtaacatcgtccgatgtttcaaacaacatggtaaaccgtaccgttgacccaacaaatttagtcaaccccgggtatgaaagaaagaaaagcagatacgcattatagcttgaaaaacctgttggggtatttatggttctattggctacgtcaagcacggcgccatttaaaccttcaccgctgaccgatgaaaatctttccatcaatgtcccggaagttaccacagagttttttattacgcgtgatttatcaccttcagtttctccatcagagataaagaaaaactcagtcgctgttaactggaaacttctcgcagaccctgtaaaggtgttgtctttaacctgaaaataaacgctaaccagctctgatgcggttcccacgacaacataatccgccattatcataaatgacgtttcgtcaattgagatcagcttttctgagcctgcaacctgaacacctgaagactgaacgccattccgctgcgcaagcataccaatttgtgtagctgtcagtgtccgcaaaaatcctgatgagcaactatacttcgacaccaaccgaatagtttccccggctctggtcctgttgttatgaaccctctgaaatgccccgatgtatgagttgtaaccattttgcccagatggaatggttatagttgcagtggttgagtccagagtagccccgccaagcgcctcggcggacttaggcgataaataagctaaattatttacaggcgggatatactggctccggttgaaattagttaactcagatttaaacccattcgggtcttgcaggcgataatatgccgaccggttatgaaatgtcacatcactgctgagagcagtagtgtttctgtaacgcattgccagcattacagatgaatcacttgatgtgatctgccgttcaaatacaacaatagtatttgtatctgatatactaactatgctaagtgggatatttgtaatatccacaccattaatgcgcagcatgggaataaaaagcgacgcatccgatagttttcctgacaggtttgcagaatgagttatgtcaatgacaaaattcactgtcttgccattcagaaaggtcagctcggaggcactcagtataagttgcgcaaacacgtaggtgttaaatcctgtctgccctgctggtgctttccacccaccatatcgtgtaccagtaacaacttctgatccatcccagccaacagcaccgttaaacaactcaccagaataagtcattaatgctgttgacttaatacctagagacagagagagatcaacatccacacgagaggcattttttcttcctgtttttatcaaggttccagactgattcatatactcatctgagagagtattatcagcggtattaattacccaacaagttttaccattcgcgatatttccagaagcaacttctgcttgggcgtcagaaatagttgaatattctcttatggttgatgcgacggcagctatccctgggacagcagcaacttcctcggctgctccattattgtttttataagccctgaaagctacagaacttccacttccttgcggtacttgaaaatattgtccagaaacagtcgcagacaggccatcactgacatttgggtacaggtttccaaattcagaagcttgcaatgcataagcttgtgcctcatctcttgcctctatggtctcatccttaagactaaccatctcgtctatgatgcttaatccgccaactgtttgccatgttgttggtggaattcctcctgagctatcaggtgtggattttgcggggactatcttggggaatgtacctgcccatgtgtaacattgcgcccctgcaatatgccaaatagcatcggttgcataggttaatgttgcaccatcctcgaaagaaccttctaccaaagttagcccaagatcatgaagtgcttttctccataattctctctcatttgcacgggcagtgtcaagactttgttgaacatctgttccatcagaggtccctataagagaggcaccgcctggcgcagacaggtctcctttgttagccaagtccaagtcagagataacctgagagacagtggcctttttagttttatctggttgttctacaacaaggtagtcgtctccgaccacctgagctgcggaaggtaactccgcaattttaattgtttctaaggccatcttttatcctccaagaaattcgtctgagacagtatatggtgactgtcatataattgttaaggccttgcatggcgaaggtgggactattacatgcgccacgacagatttttcttcactaaccgttgcaggccgtagttggtatgaatagtgttgaatgccatagctattgatctctaatattacatgttcaaagacgcttccagtctttccagttttctgcgcatatatgcggcttctactgtcagacactcttctatggatttgcggcggcaagaccaccatcgggcagttcaacgatctcttcatctgcggaagtcgctccatctggcaacgggttgtgttctgcgatagtgatctcacccgtctccggatcctcgatgtgttccttcatgtagtcccactcaccgatattaatcactttaccttctttattgcgaataaccttcatcattttgccacccatcctgtatttccagaaccagtttctttgacgtaaaaacttgtattagctccaccgtcagttcgtctgtatgttgaacctactgatgcagtaatcacaccttcaggagaaccagaaccataaaaatcacctacagtcgatgtgtacattctcttaattgcataagaagcagtgaaacgataaccagactccccgcaggtagttgtattgtctgcattcggcctaaaggttccagcacccattgtcattccaccagcgtcggaaaaacttactgcggagcgaatagaaaacctgattgatgttgggtaaaaggcaactttcgtaccacctaaccctgagttatcagcataaccattgggattaccggtgtttcttccccagttataagacataaccatagggccgttggttagtccgctgaggtcatctgcatacattcgcatatatgcaccgctatatggatgtttccatgcggcaactgcaccaccctcggaagggatgcttttggcctcggtattccccgcctttggttgtggaataaaggaagtcgaacgtacaccagaatatgatacggaatcgccagacgacaatttcatggagccgccaagctctacaccattccctaaaaccacatctggtgatgagtaagtagtgaatgggatatcgagggcgataacaccgaagtttttctgtgtctgtttgccgacgcttatattgaccaggtgagcatcggtaagggagtcatcaaactgcatcccattttttgcaatattcatatcggagccaacggcaacaagctgatagccaccagccagaataccattgttccgaagctggttatgggaaacatcaactaccgaagagtctcgaagagagatcccactcgttccgttgtcgtgaaaattattccacccaatagcaaggttattaccctgaaccaccatcccagttgcccggtttttaaagctctcacaaccggacatgttcagatacttatcaaagtaagggccgttggcaccactagttaccgtagcgtggtcaaagccatcatagtagttaccccacgtcttacacccatgttgtataacatgtttacaaatgatgctttcttctgggtaggctgccgagtactgcccggtctgtacacccgattcagcgttgtcataagtgttaacgtctacgatatgcacgtagtcgctacctgtaacaaaaagtcccatctgacgagactcaaacaggtcacactgcatgaatttgtgattagcacctcgtccccatttgaaaggattcccatagatgtaactagaaccagcgttccaaccaaacccggctgtaatgggtagttggcaatcattgagaaccatgattccgccagccaaagcaccaccacgtattttacagtcactgaaatcagtgtttttgaaaccagctgctacgacggcagcatagctaccacgcacaccagatacagttaacccatcaagaacgccagaggtagaagaacgaaacaccagtgagcagcaaatttgctgataatagtgagaggaatcaacgtttgtgtcgtcctggtacggcatacgaccataacccaggtttccgctttcaacgatgttgaaatcttcgtcatagacaactgtccacggagttgttttgctgagtaagttgccgcctttccacactgaaccagcgccgtctattacgtcaatagcaatgccatcacagacaatttttgcatcaccagcatcaacgaaaacaggaccagtatgaacaatcgcgttcgccgtgatttggtatgtttttgctccatccaattttatttgttttgggctttgagagattgcccaagcgatcgcggcagtatcttcattttcattcccttgacctgtaggcccgaacatttctggcgtcacataatttatgccatcctggaccgtaccgccttgcaacaatcctgattttcctgcacctgtaggctgcgcaagaaccgccagtgtagactgttgaactgaatcttcaagatgatttaaaacttgaaataaagttgccttcttagtatcatctggttgatcaattacgatcaggtcatcttctgttagagtgtccacacttggcaactccgaaattttaacactctgtagcattgtaggcttacccctcttcttaacattagtacattttaccacaaagttcaaagatttaaaagaacaatggtctgccttaggggagcacagacctaaaagaaatcttgaattgtgataatttttattttatagtgtttatagccttatcgcctggtgtcactactggatcactttttctggtcagaagagttcctggtggtacagggtttgccatatcaccagcccaagtattccaccaagttgcatcaccagtcttaggtaatctgaagttgataagatagtataacttattcccccagggtatccaaccctcatctccgcaaagggttgttgtttcagggtttggcgtcgggtagtagtaatcatccccgcccacgaaggctattcttacaatctcctgctcttttgttaagacttcaaaaaaagcagaatagcttcttgttgtatggtccattacagactggaaatctgcaatttctaaaacatccggttcaagacgggttatttcctttatcttattatcaaggaccgtcttcataacttttttacttatgtaggttctatatgggaagccaaaggtctcatcaaaataccaatctcctgcccacacattaaaccttagccacaagcgctgtcgtagacttacttggttggagtctatcaactggagacctgtagaaacatcaagatctcctgtcacagggtccatcaagaagtcagaataaagagttgccatctattcccctcatgcatttggaacatcggtattgttctgaccaccatcatctgtccaagtatagtgatgtgtatggcgaataaaataatcataaaaatcattcatgtttacaccacgcgctgtaataatattaccatcaggggtaacttgagcgccattcatcttaatcgtaccaccagattctgctgtcaggtttgccgccctattatcgaacttgaaattcccagattggtcaactactaatttacctactggcgtctccagcgtgaaatcacccgcaggtgtcattgagaaatgcaccttgtcgttccaaagttcaacattatctgggtcgatggtcatggcattcccatcactgtgaacaccaattattgcccatcctgggaacatattatgagttgtctggtcattattatcattctcgtttctttctgagaaactcagtcccacaatatcaccaggcttcacaggaagcgttaggcgggctttccctccattagctgaaggcattgataggggaacatcaaaaacagagccataggcatccacagtcccatctgggaagtttgtactcgcaaggggctgaactgttgcagacgggatgctatagtccacatcaactaccgttgcccttagccctgtgtgaatatctctggcctgttttgcaaaccactgattaagtgctgcatccatacgagttattgctgccattagccctccacaattccaccacgggtttctgcaagtcctaactctgtgatccaatcccccccttcgagctggcctttgtgagttaagtatacaaccttgtaaaaacctgtatatttgtggctctttaaaaataccgttgattctggtatgatagcgccattcatttctgttaccaccaccaacccagcgtcttcttttatctctgcggaagtaggtacgtgaggcttagaggattttctcttagacttagcttttttttcctgtctcctctttgcaggctcagggttctgcggtgttggggaatcatgcataccagattcagcgctgatctcaaaaactgccctttgaaatcttttcccttgcgtggtccaatatacagccccatcttgaacactgaaagtagaccctgtattcttggctaatctctctaggttatttgcggcgagacccgtaaaggacatagagtgctgaagcgtctggtctccaaacttgacgattttaccaacagggagcttcatatcagaagcgagatcactaattaccgtgtctattggcgtacctttcttataagagcgagaggtctttgccgttttaatatttactgttgcatccccgaggatcatctttgtctgacgggtattgccgtcccacttatcctgaacaaactctacggtcccagaaaagatagtctgattctcaccatcaaacccggcctcaagaacgatagcaatggactctcgttggttagcatcgaggtagctcaccgtctcatcggagaggttgtagatggtaacataccctttattaggctccttcgagttgtcttttttgacctcgaactcgatatttgcggcaccagtttcattactgatataatacgcatctttggcattctgattagtgtaatctgagatattggtaggcttttcaccaacatacactggtttgcctatcgttagcttataggttcttgttctgtaagcaggcattgtttactcctcagcagtcgttacctcatcatcaggagacgagtaaagtagttgcaagtctgacaaaaatccaatattgtatctccctacacgtttagttgattgagtaaaagaaaatactctcaactgaccatcgggaatattgtcaagatatttgaaaggcgcgaatatatcgaaaattgtagtcaatttgaaagatattgtaggatcagaaccaacatccccgaaatagacgagccaagactcgtctctctcgttccattgaaaacgcatttcataagtttgactgtccagaaccacacgcatcgtctgatcagcaaagccgtctatgtcccaagaaaatgtgatcgctgccattagttacctaccgctttattatagtcgagggtatttccatttagatccttgagtttaccgtccggcgtcagtgttcccaccacttgatcttgcttggtataatcaccaatacccatttcatctgcaaccttttgccaaccatcttgattaggcccagcgaacttggttctccttgcggtcacttccacttcattatctgtggcagaagactgaacagaacctttctgctttgtcttaccacctgattttttagggtcggtatagactgtagctaaggccgtcttcccaagggtaaaagtacggaattctgtgaattctaactgaaataccaacgcagcaccatcagaattgctacggcttgcctccagggaggtcaagatgtagttttcgatgatacggtcttcagtaacaatggtgacgatttggcggtcagtgataagcctttctagtacctccagtgccttttctgggcgacgggattctaccgggttgttagggtcggtatctttatcgatgtagttattctcaatcaggtataggggcgagctattgattctcgcactgaaagagaatttaccatcctcaataacgccgtggtcactgtattttactttgttttcaacagcgtaggacgtcttatcgactgttctggtataagagtggtcttcaacaacatcaaaaaggattgcgatattgtcggtatagtttttattctttagttcaacgtttctaccaccgttattaaggccgctcgcaaacaatgtatattgaacttcaccactggcattctgagccgtagagaccttttgctcaacgtttgctgtagctttaccttgttgcggcttggactggttgcttgatacaactgccataaaacctcctcaataagcttgttatgattttatcataaatcttcaactaaaacaacgaaaaaggggccgaagccccttgtcttattccgggacaccaaggatgaggttgatgtttcccatgtttgaagcatcgattcgttggtcgatcatgttcttcagctctccggcatccagtttgatagttatttcaccagccacaggttcagtagggataaccatcggaggggtagcagaagacttaccattcgccccaggcatctgattgttcagataatccagggttgccttatcaggcccccagaggttagagaaccatcctcctgttttgccactaacaatactgtcatgaacattggagaaaactttaccacgctcttcgttgaagtcactgtaggggttatatctgtcgttaagttcagaccctaaggtgaacagagacagcagtccacctaaagaacccgctcctttaaagaacttacctatacgagagaatctgccacccctggcaggacctgacccgccgccaccttcccctccgcccggtggagcgccctcgcctttaccaaaaacagccccaattcccttgatcgcaccagcaagacctgcaatcttagcaaggatattgaatacacggaccagcgatgttgcgaagaagagagcgccaatgccccagccaacccagttccatgtcttagaaatatcttccccattctttctgaatatggggatatatctctccaagatcgcattgaccatagtaaaggcattatacagggcataaggtatcttcatgaagccatcaataaaccctgccacaaactgacctaccgcagccgcaagaggaccattagagtcaagaatcttggcaaggttattaaatgtctctgtcatcttatcaccaaaaccagattcgaagatcttgttctggaagttcatccaagtctgaccaagacgttgcatagcaacccggttaccttgtaaagctttctgtagtgcccctcccttgttagcagcttcagcatagtatttagcaacgaacggaagcactttagcagctttcagttccccatccttcatcatatccatcaacttctccacgttgatggaggagtcgttaaaagcttcttgcgatgccttcacgaacacctgtaatgatccggggataccctcggcaagctgttgcttaagttcttcagacatgatctgtcctttgcccatcatctgttgaatagctgtaataccgcgttggtattttacagggtcaacctgaagagcagttgcatactcagagaatgacttgaagagttcgtcgttttgtgatttagtaagcacaccgtttgctgcgatagacatttgtgtgtaaccctgcgcagctaccttaaggtcgagacctaaacgatacgcctggtttctcacaaattcaatacgcttaccagcctctgcggagtcatcggacaccatcagcattgttgcttccataccctggaagaactgtccagttttcagaacgcttgcagcggcattgaatgctccgtatgctgctgttacgctgattaatgtactacgtagatttctcaggccatcattcagagaaagagtattggcattagctttacggagtccagtttccatagcagcaagctctgcacggaagtttgatgccttcatgttcccgctcttcatatagcggttgactaaagaatcataaccaggcagttgccttgcatatttatcaccatacttggcacgaagacgaatattggcgttagagattgtacttatctttgcttcacgcgctcttgctcttctccccgcttcccgctctgcatcgcgggccattttctctctggtcttattgtctgccttatcctgctttatttgctcacgacgcatacgtgcatggtcacgctccattgccttacgttgttgctctgcaagacgaggatcgtgaggtgttgcattaggattcaggattgaggatccgccgctccccgcgcccttatttttcaggcttgcttcatatgctgccatacgtgcagcagaaatggaagggttagttccataattgccgttcttagcagcaagtttttcttgttgacggagctgtgcctttagggcattatagtttgcctgcgattctggagatcgcccagcagttagcctagcgacagcagccttacgacgtgccttttcaatcttatcgatggcttcacgagcacgagcttctttctttgccattgcaatattgtgagctgtggtcttcgccgcctctgcacgttcagtttgattgagtcgcttattgaccattctcgcctgcatagcagaacgtttcagggccgcagcggggtcggctttagcagaagaaaaagccttcccggtcttttcccattcggagcgaatttgctttacagctttcaaggcacgtccaaaggacgttttgtcaacgtcccatgttaccttgttaactgtagaagtcactataatatttgccataatttcctcaataaaaaagccaggctcctgaaaaggaacctggcttgagattaacctcttctgcctttgcttcggggtttagctgcttcggcgtctgctctcgatttctcttctttctcattaacatcgttgatgaaatcttcgatatcgagatactcatttagcttaagcaaatattccatatcggcagactcaagggagatataagattcccccttaaagttcttcagagcacggcaccagagatagtcgaaccacgtcagggaactattttttcttgcatagtcaatagctctttggacgactttagaaattttggacggtgttactccgctgccacttccgtcggttcctgatccaccgtcgctacttggtgaaccatcccgaagttgcccagaagtccctgaaggtctgcgaaaccgtctttcgtgaaaaaacagccgtagttaatcctcagaacctccgctaccaatttgatcagatccaacatcttgtcctggaaaattgtatcaatatcaatcttgccagccatgccgttcacagatacatcctcaagaatgagttcgaataatttttcgatatcatcttgctccatctgctcaaacaggtatagaattgcagtaggtagtgcttcagagaggttagcgcctccggtaaataatgcgccactaatggtagccattggaactgcgatataacgaccaatcttcggaaggtttttcataaccttggacggagaccagtgtgtgattacaaagttcttaccagccagatcaatttctgtggtaggtctaaaattcatcatgtgtacgctcctgcgtcttttaaggttgttatatccatgcgtgtttgaaaaggccacatccttgtggcacacgaaacgatattagacgatacctgcaagtccagccagaccgaagcctgtagaggacagggtatccgggcttaaccatgcgtccaggattccgatctcccaatccatctggcccacttcagtgccgtaggtcagatcaggctgtttctgaatccaaccaactgtgctcagacccatgccctgagagccttcaagaaggacagggaagaagaccagcccagtaatggatgcttgtttctgccagttagctaagtacccgttccataccgaagtgttctgtagagagacagtcaggacaccagattggttacgagacagtgctgctgacagctcaccatcaacccccatatgggggatgatgttatcttcgttgcgagcaacgacgatcttggtatccgctgcgaacccggttactcgctgagtcatcatatagagacgcgctttctgtgggtcgtaagcatacggggttaaaattctagtatccatttattacactcctgctgttacttgtccgctggaagaagtagacccagttttgtctaacagaacagagatgcggatcttgacgaaatgcaatgaactgttgtagactagctctaccttaacattgttaagggtacgagatgcaaggtcgttagatgggatgtttgcacgaagcggaattgttacaaccgggtcgtagaacaccttgttgacggaatcatatccggtcaaaatagaaccattagtgataccgacgttcagaggactgttcatcaggactgatttcaggttcggcatatcctcatcactcatcttcatggaaagaccaagattagaacggcgagacatatatgcgaagatgctctcttcacttctgaacttcagccagtgtccgaaacgaactacgtcaacatactcaccggaagcacacttaccttcccagaatgcaccaacaccattaatcatacggtagaagttcaggttctgtccccagatagctggacgatcagaagaactaagggtcggagcaacaacacccggcattgtcttcaggtggatagagtcaccataggatgggtcattagatgccattgcaccgatgataccaccttcagggaatgcgctatctgcaagcgggtcatacataccgatgctgttatcatactggagtgctttcagttgattagcaatggaatctgcgtcaacgacttttgacagcgggtcggatgtggaatagacgtgcagcttatagttcgcagcagcataagcagcagctcccaggattgcagaagaaacgtgttgttctgtgctcaggaagtaccagttgctatttgcagtttcaatcaccggaagagttccgctaactgtttccgtagaagcatttgtaagtgtgcaattcccagaatcaataccgatgctgaatggctcgccgataacatcagaagatgttgccataatgccctggtcagactcggttgtaaccacctcgtcattgttagtagccagcagagacccatcgcctttcggggtgatggttacaacaccagcggtagctactgcaccgacaattacattaagcgtggtatcggagttgattgcagatgccagggctgttgcaatactctctggtgtagatgcggtagtaacaggaataacgatgcttttagtatacgcacctgctgcaacgttgaaacttaccggattattaggatctacgttagtctgccctgtgaaatcgataactgttgattcccatgcttgtcttccgatcataagcgcttgggggcggaaagtcccagcaaaggcttttgtcgcaaaagtatacgcaggggaacctacagcgaaaccatcagcagcgagttcatccagatctgtatatgtacgtactcgttctgggaaaacgttgtgaattgcgataaatagaggggtttcaaaccctacggtgtcgattggttgtgtcccgagaacaaccgttacgtcaacaaccttatcattataagccattgatttcctcttcttctatttctttcataaagttattgttgatcatctggagccggatagtaataaaccatctctgcattcaccctctcgatatcctcgaaagctcctgtatctgtcactccaacgcagacgttaaaagtgataagtacagttgcacggttttcgaaggtttgcatgttcaacggaactctctggcgcgataccgttgaggaagaagaatatgcaaatggggaattggttggaaaatacttgtcgcagatgtaggggaggctcaaggcctgtagaatccgagttaatgcatttgatgcttttcctcgaaatgctgtcaggttgtaaaccacctcgtagttgtgagttattacagcgttaccgctctcatctacccactcgttcgcagcccagtccatctggtcagcggtaacttggttgagcatgatgaactcaccctctaccttggatatgacgtctccgtccccgtcaattatttttctccccgtgacttctttgcaaaatctggcgagcgtaactgcgagggcgtcaaaaatatcatcggagtttgttacgaagtctgccatcataggcctccttctgtccccgcaggcgtagagatcacatacgctctgtaacggctaacccctgtcgtctgatacggatcagacttgataacagtaaaccattccatttccccacgggaattcatgagctggatttggtctgctagcaggaaagaaccttcgacaggacctttaagaagagttgacgaatatacagtgaatgaatcatactgtctgccgccagcctcggtcaactgagaagtgtagtctcttgctgccttgcctgtcagaggctgaacaacgcattccaagacatcaaactcttcatactgaatagcgatctcttggttttcgaatggattgcttgggtctggctgggaaaaagtacgatgtctcccgatgaaagtctttctcggaatcagcttattcctgcctattaatctgtagcctggtgtcatttagtccccttcccagtggaaatcttataggttgcagatgacttcaggtcgccgtagtggaacatggcctctttaaatcctttgacatcagcccatgcatcagatacgatgttattagggaacagaccaccttcgatgacataccgaatcttgtctgcacctgcttgaccgatttgtttcaggactggagtcgggtcttgcgctccagcagccaattgaccaaagaggtcgatctgaaattttttaagttctttctggaaaagaacacccgcgctggtcatgaaagtacgagccgggaggttattccaaccctcttgatgaatcgctgcaagagttgcagtattcaggccggaatagtgaggatcgtcgaaaaagccatagcttacctgacgataatccagcttcttaaccacattaaagaagttcatcagctggctaagatcttgcgtacttgtgaaatttggtctcatgactgcatccgtttaggtattttaccacattatcttagcaaaatcaacgataaaggtttggatagttagcaaggccaacggcgagggtatcgacgaggaattcctggaacaccagtctgtggaattatacctccaacatcgaaaggtccacgggagtttctgtcgtatttaacacggttgaactcgtcttcacgaactcccccaacgataacaaggcctctgaccgcacttaagcaatcattgacatagtcagggttttcaagcagccagtcgaggaagtctttccaattctgataaggagatccacctttgatctggatagtttcatcaccaatcttttcaaggcgatccgtgatcgatgcctctcctgtgttcacttcctgaagaatcaaccaacgtaccacgtcaacaagagtattgtaaataacgtagtaaacagtgcatggcgtgttatcatcaccggggtaattagcctttgatttctctattgccaaaaaggcaaggataatctcgtcgggtaagacttccagggaaatggacccaaggagcaggcggatataagcaacaatttcttggtctgtcattttcgctccttcaagctcttctatttatcaatatcttatcatagaacgtcgattttgtcatcaaaaacacttgacatcatgtgacaggatgctattctcaaagaaaattattgaggagaatcccatgaaagcagtaatagcaggtgttatcacagccatcgttgtctcgggtggacttatctactttatgaaaaccaaccccaatatgaacaaattcgacgatgtttcttcaagctggttgtcggctgaagaaaaaacagaggccattcatcggattgctgggatgaaatgcgatacagaattcagaaaggcattcattcccggcactctgacgacgcagacaggtatgttagatgagatggaagaacaagaagatagtttccaagtaatgagaaatatggggatagtgaacggtactgttcttgcaacaggaacttacatctgtaaatattataaggatggccgacagccttatcttcaggtatctttgaaaccagaggcgagaccgctactaaaaaaataaggccccggagggcctttatattacgccataatgccagcagccttcagcttggaaagaagggcattaaagtcggtaaccagtccagctacgtcagtcgcaaccgtattggcctgtgttgacgccattttaacaccgccaaccacagaagtggttgcagctacgggagcaaaagtggtaggcttaccagtaatatcggcccatgccacagatccgccactgccagcggcagcaataacatcagcgaaggaaataactccgccagttgcaatgtcaatcagttttgtaccgtagaccagtccagctacaccagatgttgccattttaaatctcctaagattattacttcagtgcggattcgaagtcagctaacatattttcaaatgtcttgctcttcgacagggtaacacccttgtttgctgcgaattcagcaagtttgtctttactaccttttttgtcggcttcatcaagcagtgcagatgcttcagcaagaagtgcctttacgtccacagagtctgtctcaatgatttctgtattatcttctacaacctgttcaacaacggtttcttccgcttttggtctaaccgtaacaggtttaacttcagacggaggtgtaatgtccccgttaaagaacacgatgaagttgcccatcctcagagtagaggtcttggcgtctacaggaagaccggacaggtctgcaagttcctggaaaaactccatgaaagaacgaaaagccttcatttgcttaccaaggacgaagccatttaggggtaagcggcttgaagcgctaatgttcaattcgggaatgtatgccccaaagaacttgaaaagctctaccttgttcgggaaaatgcgataattttgatttgccatagaatctcctttggtcctcataaacctcttgacatataagatcaccatgctaatcttaaaatgaaaaaagggagaggtgattaacacctccccctcttagaggtagctttaagctatattacgcgaaagtaccagtcagtttaacaaccagctctgggcggcagttaactgtcaggaaggaggtttcagattcaaccttctcttcacgcaggtaagcagaagatttgtaccacaggtacagttcttgtgccggagtgttcgcttcacgaacatcgtctgctggcgcgtagtggatctggaacatgttgtcgataccgcgtggcagcatgtaagcttcaccgtccgggatgtagccggagatatcttcgatgtacagaacgttcttatgaacgaaggaacggttgttagcgttctcttgtccgtcaccaagacgacggcgcagcggttcttgagtggaactgtagtattggtatgcgttcatgatcagcgggtgacctacgaaagcagagaaccatttacgagaagccaggactacgatgtcgtagttgtttccgttgtcaccagcgttgtcgatgatgaatgcacgaccatcgttttcgagcaggtcagacgggtcaactgcaacgtcagtgaaatctacgttaacaacttcctgggtaacaccccattcggtgaagtagttatactgagcggtcgggtcctgcggtgcccaagatttacccatgattgcctgaagcattgctttttctttaagctgttcatgagaaatacggatacgacgaacaacacgttcaactacatcctgtacagatttaggagcgtccgcagtgaaatatttacggaagttctgtacgtctgccggagtgatctgacgatccagcgggaagaacgggatgttgaagtttttcagttgggccttttcagtaccaacgtagttacgttcaccctgacgacgacgagctgggaagtcggttacaacttcgtcaacacgctcgatctgggcgatagtagagacaccgtgataagcctcgaaaaggttcatgttggtgatcatacggtactgacgaggtacaatttccagagttgcgcctaggtcaacgatctggaaatcattagtgcgtactactgccattattttctccttggtgtagattagatagacgttactgggatctcaacggagccgtcgtaatatttatcagtgatcttcagacctttggcctcaagagcagcgatagcagcagcgttgatagcagtagtaccgtcagcaaagaacagtttggatttgttcagggtcagaccacgaacagcaaccacgaaattgtatttttgaccaactacgaaaggacgtggcatggtgtaagaagaagtcaccaggtcgcggtcggtgattacaccaaatgcgcttgcagcgtcggcagttgcagccagagtaccatcagacttaacgatcataccggccttcagccctgcggaataagtgatttccatttccaggaagctgtagccctgatcagaagaatcaactttacccaggacgatgtcagagtagaacccttgaatcggattagccatttatattatctcctcgatattaggcagttttgcgagcgcgagcagcttctagagctttctgcacgttagctttaagaacatcttcggcggacttagctaggtcttcagtaacaacctcttggttgataccattttcctgagtaccgaactctttcttcacagtttcaacttctgtttccagttcgctaatacgagcttgggctttttccagaagagctaccactggggcgttagctttttcaatgatgaagtcagcaagagattcatggtcttcttcagcggcaaaagtaaaacctttggcttttgtaagagcatttttcttttctgcttcaacagcagccttgataatcagttctgcttgggcattttttgcattagcttcttcaagctttttaaccaggtccaggtactcctgggatttggttacatcaacagtatcggacacagaggtctccttgttttcaattgtattttgaacaggtacgtctggtttagcagcgtccttgatgacctcagtctcctgagtgtctttggcatcaaaaatgacaccgtgctctgcaacacccttctcaaacatctgttggagtttgattagttcatattgcttcacaaggtccagctcttcacctgcatttgcagctttggcgatagagatggactccatcttcgattctaaccattcttggttatcatcattccaacgttgcagccattcatcatcaggattttcagcagcagcgttttccagttctgtttcgaagcccaaaagtttggcaaggagttcagcatcactactccacatatcgaagaagcgacgaaggaattcttcaaagctcatatcgacagtaacttggcgaagtgccttaaccacgtctttggtaatctgttcaggtgcaaggtcagacttcatcagaagactaaccggacgcatatttgcagaataaccttgactctcgtggcagagtgcgatacccttatccttaatagttttggccttgactacgagtgcgctcattcgttttcctcggcaatctcaatcccgaaatcgagtccggtgatttcaccagtctccttgtctgtgtagccagagcattgaatgctcagtccaccgacagcgttggcctttttcaagagccacagttcaggatcattgtatttaaccttagctacccaggtgccagctttaatgatttgctcgctaccgataaccacgacatcaaactcttcttgaatccaagtcttctcgatggtaaaggcatcagtctcgacaatgtggaacaggttctctttaacaagaccagccgctcgcgcagcatcgaaactttccttacctttgacgattgtctctggagacatccattcaccgtgggcatccctagtgtttggttcataaatgacttcgtaagaaatcatttgttctccagcatctttgacaacagatacaggcttggcattcttttgaattgctgtcttcttcagccctacatggagtacatctttagatgctttctcaatagcggcttcaggagataggcctgaatcaatcaggccatttgcgagaaccagcaccttgctcttctgaatgagagacagattcgatactgatgcaggaaggtcagcaatacttgagtatttcatcattttccccgttgatagttattttaacaccgtttattttcttttgcaagttatttcagtgagttgcttagttatccaagttagagacagaattatctcttactttagacgtcccattaccagaagtaccttgcttcattccatcaccggagcgactggtatcttccccaaggatcttgagtagttcctcttgagatgtgttttcaggaatctcttcatcaaacccaccaacctcaaggatcttgttgataactgtaggtgtcttcggcagataaccaacagcaccaattctctgaacaaatttggagaagctttccatatcaacttcctggatagctccaggcttaagtcttggcatgtcttcatcagacaaacggatattattaagagcgagtagttgaggaatcaagttcttgttgaatgattcacaaataatatcgatatctcgttgaacaaaatgtccgtggattgtttgttttgattccgacaggttgtaagacccttgaccatcattccctaagttgatgaatcccgcaccaaatctgtccaagatcgccttcttacgctcttgtattaggtccttggtactgtactgtttaccaaccccatcgattcccttaagggtcatcttatactgctcaccgcccttatcattcatatctgaaggtaagatgaagtaagattgttcacctgaatgtgcgtttgcagcgtcagccatcaggccacgaaccatatctgcttcaggtgatctcgggtccatagatgccttattcagaattgaagaagggatctttaattcaatgataccgccgaggtccttagatgcccctataacttcgaggttttcgatcaggattttttcacggaatgcacggtaacaaccaacaagaggtgatacacctgtagggtttgattctgtcccaccaagagacattatcatcaacttattcacaggaatgaatttctcatccgcacttcctgacagatttgtgacgagactcatggccccagcaatctggttcatcccgttctggaaattagcaaaagctagtgcgctttgataaacacctgtgattgtccttccatcatcgctgaagacaaaaggttttgtacgagagaggcttgactgaggacggaaagcaattttgtcgatcgtcatatagcctgcgtacttagatggcgcggattctgttctgtagaccttttcgaatacagagaaaccatactcgttaaatgtcgcagcacttctcgccacatcgcgaagcgtctgttggttagcaagattcttcagagcatactcgacgaaatctgccgcttttttagactcttcactatctcggttgaaaagaattttaaaatcattgaaagccttggtgacaaaaacatatttcgtatccagcgctgtggcaacagtatggtcttgcttcatggaatccactgttgcgaggaacataggccagcggagttcttcaaccttcataatctcagattcagcacgaatctgagacaatgctccactacccagttctccagtacggacacgactcacagcaaggttttcattccctgcttttgccaccgcattctttctttttctgtttctgcgatttgacacgagtcatcccctctattataatcgtgtatacatagtcggagcaacaatccttgggattacgacaggtctgatgatctccgttttctccaggaagttaatacctgaagagatggcgtcaacccagtcgtccttacgggacacagtgcttcgctcgccattaaatttctcaagttcattcatgagggcttcatatgtctttgcgtcaaaactgttacggacaatacgaacaaagccttgttgtgcaagctgggcaaagggtgcgaaacgagtaagtttcgacttgttgcctggcgtagggtctttctcaaccacataaccatccgcgagcaatgctcttgagctggtgaggaattcgcttataccagcttggcctgggtcaactgagaaaataatcgttacatcatcaccatcatgttctgcttgttttttgataattgcatcacgttcgccagccttcttacagaagcggccttgagttcctgtggaatagagaccatcatcaacgaactcggcacaataatcaccggataaatagtaaaaaccctcggtgtctttactcactttcacggaggctgtaaagtcaggatgtctgttaccagatgtcctttcagttcctgccttatcgtatggccttacagatgtgcaacctaaaggtagacatgccacctctttcaaataggatctttgaaaatagtttgcaccctcagggcgagcattccagttaccataaagtaactgtgccttttcaacttcaggaagccctttcaggaatgccagatattctttgttattctccagcatcggagggttatcataaatgttagcggagatgaaggaaaatgtcagagcatcgtcggcgtcatcaccataaagctctctcagttcttcttgagactcaccccagacaaagttaccatcttgacggaggaaccaacggatgacaccgtcacgctcagggattggatatccatcatcgtcaagataccaatcgataagttcttttattttgtgatccgggtccgggttacaagaaattaccatgcgacttgggtatttagattcagaacgtagacgagagattaggtagtcgatctgctcccattcgaactggcatccttcatcgaaaccaacaaaagtgtactgaagaccctggtggttaagtttgtccttcacatattccatgtgagaccattttacctttgcgccaggacgaccctttttgaatgtctgtgtctccgcgtcaaagtatgggaatattgcctcaagctctttctctctaaagcgtggtttccatgcatcaggtagttcattataaatgctttgtgctgtatcaaataaaccaccctggcctttcaactgaggtgtggttctacggaacatgatacagttcgattttggatcatcgatatatgctaaaggcattaattgtaacagatacgatttacctgaccccgcagcgcccccaatgatcaggatttgcgccttattttccaggatcattttctgcttagggctggcgggtccaaaagtcttactcaaaggacctccattattatatgctataggaggattttaccacgaaagatcataaaaataaagcccttatcacgaaataagggccttgtcaatcacttttgaggtgtaaatatgttacgaatgtatgcctgaaggataagtaacttgctacgtgtatccgctgcttcaagattatttttcttaacaatagcactgtttttagcgttatcagcaccataaggaagtggtgttgggtcagtaggtgggatcatagcgtaagcagggggcttagaaagcacctcagagggattaaacttctcaaccactggaactaccttctgtggagactcgcatccaaccagcatgattacagagaggaatatggcaagcaaactctttctcatttaacccccaagctttcattatagatatcaacaaaatcgttatccagcccaaactttttacctgcttcagatttgttatatgcctcttgtttttcatcgaggcgagacctaagcagttcattcttagctttctcttctgcaagctgacgacttagttcatccgaaaagtcttgctgcccatttttaaaatcttgatttgcatctttgttgtttctcatttgcagatcccatttgttatccgtatcattaactccacggctataggcctgctgtatttggtaatcataccaccccttaacttcaaaagcgccccacagtagcgccagagaaaggacagtaatgataaccagtttggtatgtcccttgataaaggtcaaaaccatactgataaaatccatcatgagagatccccatcacaatctaataattcaacaatggtcactttatttcgaggcgctttatcttctcggtttacagatactctaccatcaccctcgtattcaagggcaagtgggtcttccacgtcaactttaaagaggcaagctccaggttctatcgctcctgcgtgccaactaccctgaaccccattcttgcataagagcttgtacctctcttgtgcagcatcaagatcaaaataaatcctgatcttatctagcatctctggattgtcgatgctattgctgttaagaccgaatacgtgtttttcggtatgcgcctgcatcatgtaaaaatgcacagcactagatacagcccagaattccttgaaatacaggcgatcggtgtttttacgcaggcgttggaaaacattgaagatatctttagcttcgagattaaaacgccgttggcctttacgcttgtcggtgatagtggcaatcgtgctgatagcaatatcacctgcattatccagtttatcaaataatccctcaaatgaaaacggctcttttgtatcgaagagttcttcaacgtttgtcccatacataccgctaagatgctttttggcatcttcccagctttccattttgagacttgcgacggcaacacccaacttcattatttctcgacgggagattgtatacccacgggcctcgtactttgacgctcggagcatactgatgatcgggtagtctgtcgctggattaagaaccaacactttctgtgcagcatgtttaaggaaacgactgtcaaacacccatgtttcatcactaaatgagaaggcacccatgttgatggtgtagtcaaacttatcaaagatctgcccagcgttctcaaataccgagaatgcaatgcattgcatcaccggattagaaccatctgaaaacataatgcttttgtctgtcatgccgatattacgaacatatgagactttcttctttctactttcgagcagtttttcaataccatcccaagtcgattcagagatatcagacagatcaaaagggcagtcactggcaaacttatcttccatctccaagatctcttgcttagacactttctgagaaagaaccttgaatcttggcgcacgggattcccatacctctttcccattgtctaaaatgaagaaatcacgataaacacgtttctcttcattgtatcccatcgttttaggtgacaggtcatgttcaccttttcgtaggtctatatccatcatgtaagtaatgaagatctccaagtcatcccatgaacggaagtacaggtcgagatcattaacttcccggttggtaaagagagccgtgatagcgccacctgcgattataacatcgaggctacgaaggatatggtaaatatcctcagagaaaaaactttttagtaaacggtattctcgaagatgctcattcttctcgtaagtgtggatcattctggtctcctttagtaagctacttttagtagtgtaccagaaaaagaaaagccccgcaagagcggggcgaggcaaaggagaggagatataataatttattgttattagaatttggatgcgtgagtgggaatcgaacccacaatcttcggcttatgaggccaacgtgatctatatatccgtttcactaccacgcaattgaatttgccgtcccaggtcaaacggcgtcgttgtgttccagcctggcgtttaaaatatggtgggggcggctggattcgaaccagcgaccatctgttcttcaaacaggcactctaccaactgagttacaccccctaaatgtggtgggcaaggagagactcgaactctcacgccataggacgccagaacctaaatctggtgcgtctaccaattccgccacttgcccttatcgatccttcgggagaatgccaccctcggacagttaccatgatgagcatttataggcaatatactcatcaatccttgctccgtcctgataatcgttaccgtccgaggacgcattgcgaacctatcaacagccgaagacttcaccttatcgttgtacaccgagtcaggcttccgctatattggtgcaagcacagggattcaaaccccgacctttcgccttcgtatgacgaagctctattcagttaagctatgctcgcattatttaccatgtctccggtatttttcacggcgacgtgcttgttgttcttctttcgtaagagaatcccaagcgagtttctttctgaccctatccttttccttgaactcttctttggtaaagaatttctgatggggttttcttgcagcagagatattgcacctgagatgactgtatgagatattattaatatcaaagaacaaccccttaggatctgcactgtctagccagggggttttatgttctatggaaaaattatctcgctccataggagcgccacagtgatggcagtaattggagtcagtctttacaataaagtcccataagagatcttttaccaatctaccactcgctgtgcttgcattcattcctaactgcaacgctttcttgtctttcatcgactatccttagatgtctaattatagaattggtcagtgcggtaggatttgaacccacgacccagagcatccaaggctcccacgctaccagactgcgctacgcactgaaggtgtagattttaattatcccaggtctctacaaaactggtatcgctggctagctaatatcatgccccgtgagggtacaattggtttgatacgtcgaactcattttgagtgccttccggcaatttacatcaacatatcaaattggcgggaaattcctgaatctaacaggagacgccctcagcaccagaggccattatcacacttaactaatttcccaatatggcgaggataacgggattcgaacccgtgactccggcgtgacaggccagtatgtttgccgctaataccatatccccataatttggcggaaagggggagtttcgaaatcccgacccctcgcttaacaggcgagcgctctgcctctgagctaccaatccatttaaatactttatcagtgaaaacaaccttttgcaagagttattttaaccaatttaatttggtgggccgcgaaggattcgaaccttcagtcctctcgttaaaagcgagatgccttatccagtttagctagcgacccataactgtcctgactgtaatgttgtcgacttctcggcagacagtgagcacccaagagcacataggcaacaatacagctactaattggaggagagcaacagaatcgaactgtcaccgtatcgctacggtgggaccgggttcaaaccggagtctgcgccatgcagcctgctctccggaggaagatgtcagactcgaactgacacacccctttcggagctactgtctctttagcaaagagatcccttacctgattagggttaatcttccaattgttctttaatttctttacgaagatctgctttttctttcgcacgtgtaatagggacggattgaatttcttctgcaacaccacagttactgccgtggagcctacagcgtccaaacactttcttgcaacgcaaaagtttctgcataaatcctccataaagtggcggtggaagtaggattcgaacctacggaccccttttgggggcctacacctttccaaggtgctgtcttaaacctctcgaccattccaccaaattcgcggcagatatcgtacaacgaaaatctcgactagaacacatgacgtgggaagatagagataatcacgtatctgcaaattggggtgacctgtgggtatcgctcccacttcctcaacgtcacaggttgaacatcatctgataaatgcttaggccacgcatgagtattctcaaaagaaaacactcaaacttggcagggagatcaggacttgaacctgaactacggatttcaaagacccgtgtgctaaccaattacaccatctccctacaatcggtgagggcgcctgaaaccgagccaggctaagtatcggactgcaatcctcagcttattttgttgccgccatgcttacttatgaccgacaagatttcccgttgcagcggtagatcatagtcattttcaacatccggtcgcccccattatctggcatgaaggtgaggagtcgaaccccttacgactggctttggagaccagcttgctcccggagcaattaagttacccgcacattgtttggtgggtatcagtccgattcgaacgaacctcagcaagtatgccagtgagctacaaggtgcgcacccacttcaccgggcgttttccaattcgccttagatacccattatttggtactcccaccgaggatcgaactcggatttccagattgaaagtctgacggcctgtccatttagccgataggagcatttgtttgttgcccctgggtatctgaactattgagtgggtgtttccagccgcgcagacgttcatcagtttaggggcgtatttggagcgttatatcggattcgaaccgatgcttccgacttggaaggacggagtgctggaccgctaacactaataacgctttaaatcgatcccgtcatagtatcttactagttcccagtaccttgattatgcaatccgaaacgtcaggatgcggtactatgacggagaatggtgggagtagcaggctttgctcctgcgacctctcgattatcggtcgagcgctctactgactgagctatactcccattaattggtggcccaccctggactcgaaccaggaaccccgaagggcacggatttacaatccgctgcaatagccattctgccaacgagccaattaaccttgtttgaactgaacaatatctgttgtgaatggcttactcataggagtagatttcttatcatcaacattagttgtttcagcttcttcattctcttcatcgaagtaatcagaaagcatttgttcacctttctcaattacaaatcgagcaatattttccctgatattgtcctttgttgtggcacttgtcataagatctttcaataccttatgagcatcaggaatcatagcaatcatattggtcttaaggtcaaggatattcttctcaagctgaatagcattagactcttctttaaggggtctaccttttcctctacgacgctttgtaagttgttgttttactgccataataaccccacttattaatgttatcagatttaaatttatctgtcaagggccattttatcattttttataaaaatattcaacaacttggagcacggtaggtgaatcgaacacctgacatttggtttgcagccgaagctgttgccactccagcaaccgtgcttttgggggacccgattatttcaattcgctcccacacattcgggtcaagacgtgtcctatagtctttcgacgcttccacagctcggagtaaacccgtcccggctgtcctgtgaatttggcgaaggcggcaggattcgaacccgcatactccaattactcgattaacgacgggttagaagcccgttgagatacgccctcttaaactgatgcgccctcccggactcgaaccgggaaccctgggagcttaacacccatgcctctgccagattggaccaaggacgcaaaacatttatgtgctgcgactctctcaaaacacttgtcgggagaaggtcaagaaatatccgcgaaatacccctatcgccccaccctatgcaatgtctgtcgtttcggtttgcaacccttgcgacttctattccaaatggagaaagcccagccataaatgttttgtggagcagggtggtggaatctaaccacctatgtattctccaccgcacgtatgtagcggggatattttcaggtctggatggacctcgcggttgacaaaccgcctaccctgcattggcttctcgaacaggaatcgaacctgtaccgtccctatcgtgggaccgctctaaccaaagtaagctatcgagaaattgtttggtgctcgcagtaggacttgaacccacgaccttctccttacaagggagttgctctaccaactgagctatacgagcaagaaatgctgtttccgattaacagcctggaggagtcagttagccatatcttgtgagctaagatcctatatccaggatttaagtaatcaaagaaattttagctttatggtttagaagtttcaagtttaaacattaagctttgaacgataatctttgaatgttgaatgttgaagtctttcgaattcgcgattcgacaatttcgatcaaaccgcatcattgtgcggactgacggaaacatacgtttaagtatcatcctgtacgattatgttcggagcagtttaacctccggccccggtagaggcaagatgtttctgacttcgctaaccaaaaacagcatttaaaaaactttaccagctatccgcaggaattacaagatgttaatcaagaattcctgcaaatattttagattgatccttcaatctctacttcagtccgtgcatttgactcggaaagaacaaagtcaacgttagacttgaagtcttcaatctctgcttccagagaacgaatgcgatctgccagacccagtgggtcgacaatggaaggagttcccatgctacgaactggcgcttctactacagccaactgtgcagcgtctggcgctttatcacgttggacatatggagcacgagcagcttcaagcttcgcttcgaattcctgtgtatcacggttcaggcgaacctgagcatgattatactgagacttcagttttccaagcagaagctctttgaaaacgatggtgcgtttacgttcaatcgcctgagctacggtcatagactcgccagcgatctcaacttttgttacagcgtttgactgaacaactttcgccttcaggtcgtcgcgaacagccagaagatcctgaacaccctggaagtctgcctgagcagatttctcgaagtcctcaacgctctggatagagcctgggatctgacggtttgcgtcagtgcctttcgcgatgtgaatcgtgttcagcgcttcgatacgcttctgaatcttttcctcaaccttggtcaggatagccagagcgcgggttacagacatcttagtagacatagaattctcctctcatgaaatttaaaatttgagttacttcaaacatttgccgacatccgtgtcggcactacgcattagtttttgccagtgttgacaacaacgccctggcggttagcatcagcttttgcgatttccagacgggtttcgcgttcagccttcagatcaccacgcgctgcttcaagctgttctgtcagcattgcaatacggtcatccttagccttgctattcgcagtaagttctgcaattgcaaccttgtgagcagattccagatttgccttaaccgcattcagttcgattgcagcgctacgtttaacgtcggcaactgcgctttctacagcttcagcattgttctgctgagagatcgctagctctgcactaaggtcttcaacaacacccggttctacagctacaaggccgcgagctttcaggatagaattcagaacggaatcttcgttttccagaactttgatcttcagcttggatttttcttctgccagtttttcgttgaactgaacttcaatttgtcccagttcctgctgcttaaactgaatttcctgactgatcttttcagacccttctgccagagattgcagttcagcgactactttagtcagaccagtagcggcagtggttactgctttagtggcacgttcagttacggaaattacagttttagaatcagtcattaagttctcctttgcgttaaattaggtttaaatactacacttacagattgtgtttgtcaagcgaatctttgattatttcttcggtggtagggttgttttcaaaccatgaccaataataccaaagaacaagcaggaaagagatcactgacatgatgataaagataacaccgccactcatcgtacaacgtccttaatggagtcacaaacttcaccaacgacgtctgcggtaggtgatacgataatctcatcagcggcgtcaagaacttctgcggccacatctacaaaaggttctgcaacagttgccgtaacaacaacagcagtaccaacaatatcgccagccatacgtaacagggatccgaacatttcgttctccttttggtttagatttgaaacgagagcactttcgtccatttaagctatcgccctgtgccactacgcgagccgggccagcaagaacgggagtcgaacccgtatctccctcatttcaaacttggtggggcatgaaggattcgaaccttcgaccttcggcttaagaggccgctacactaaccgctgtgttaataccccgaaaacatacccgtgtttttaaagacgttcacggaatcgtcattccccatgccggagaaattactttttcttcttactcttcggggctacggtttcaacaaccttagtttcctttaccttaccagcacgttcacgcttggtcttgcctgtgcggatgcggtaagaagcagagataatctgaccaccttcaatccgggtttcggatttatactcgcctttacggcgatcgaaaactgatacggttttctctacaccaccgagacgcacatcgtgcggcgcagaatgagtctgagtagacttcgactcaaactggaaaggctgtttgatagcatcgatggcggatactttcttagcagtatttttcttagtcataattttctcctttgcattttatttgggaatttgtcccgtttatgttcatgaggatactaactcaatcagatatcctcgtcaacatttttaattggtggcccccggaggattcgaacctgcctacctctcgattatgagtcgattgctcatacctaatgagcttgagggccttatcgttcagagtggaattgaaccactgaccttgtccgtatgaagaacctgctctaccaactgagctactgaacgcttgatgtggtagatattatagatcacctgtttcattgtcaacgtcttttttactattactgcaaataaaacagaaaatttctcttttaggacctatgtactccttcccgcagttagtacaggctgaatgataatacataccccgcagactttcactaggccagtctctttcagagaatgcgatgcagtgattagaggtcaggtcgttcatcagtgtatacctctgggaacaattgtcttgccctagccttaatttcaacaatgatgtcattcagtctaagactgaggctatgcattctttctaaagtttccatataatgcctctcagaagtctgggtgctcgtcagaagaaatcccctctccgaaaccaacgaaaacatctacgtcttcagattgacgaatcccttcgccgtaaccaataaagccgtcaaattcatctttcatcgttttgctccttttcgttttgaacgaatgatcgccgcttcagcacgacgttgttttcgatttttaaattgttcggaagattcggagagcgtatttgattgtgagatcttcatcattggggtagaaatagtataatccaccttcttcaccgaaggaggcaacgtatttccaggcttcaattccaaaaccagttgtagaaaaagcgatctcatccgcttcatcagtggcttcatccagttccctatgattcgattcgtgttcaatatactctccgttgtcagttttgtaaacgagttttagtttaaacatagtgtcctaccgtgtaagttgttaagagtcaagttattttgataacttaatcttaccagcggacaccttttttgtcaatccatgatacctgagtcgttgacaccacgccggtattctgctatagaaagtgctctgatacgttctatgaactcatcatcagtttcccattcacagtcatcatcgtaatattcatcaagaccatcttcaatctcaggaacccaagacttcttttggtcttcatgaacagatgccctgttaaaatcatgtttcgagactaaattacgcactgaaatcagaccccttaatctgttttgcggtttcaacgagatctacatttcccgttttcgtgtttacccagcgggtttcggtctttattgcgtgcattgtatgtccacaaccaaaggaaatgatgcaaacacctggtccatgagcctcaagatcggcttcaaactcctgtttacagactttacattccatcattacgggtccaaacattttaggctccttaatataatacgggtttgtcggtgtattattacatgtcaggcaatcatgtaccgggacttcatgccacttgcatggattttccatagtgtacctatcagaaaagcccccgaaggggcttattgattacagttgagctgctgcgcgttcacgaatcgttgtcagatcttcatcgacaataagtttaccgttgtagaacacacgacgcagttcgttatcgtcagactgtacatcttcaagctgacaattgtcaatcagttctaactgaccgaacatgttgcgaacaactttgaggaaacctttcgcagatttcttaccgaggtcagtcttaggctctttgacaaccatgatctgctgaccatcaatcacagcgccagttgctttcacagccatacccagtgaatcacgggttgtgtactgggtggtaaaggaaccaacaccgtacacgatattgctggatgcaaagcctttatctttcagacgttcaaagatgtcttttgcacgagcaacagtgatggaatcaccatagatcagacctacatgactgtccagaactttgtaacccttggagttaacttcaccaccaaagatttcccacagacactgaattgcacccttaacttcatgctcttcaagacctgaaggttggaagtcgaagtaggcattatcttcatcgtcaacaagaatccggtagtatttaccttcaatcttggcaacttctgaatttgaatcttcctgtagtgctgagtgtgcatcagaccagtcatcaaactcaccgaggctacgatagcctgcaatgatatgttcaggaatgccggagtcaggacggaaaacaacacgaccatcacgggccatgatgtcctgtttcaggatcgctgctgctttggtgataatcgcccagaagtcataactgtctgccacgtaggaaacaaaacctttagggaaaatttccgtaatgtagcgtttcatgaattcaacttcagccaagaaacgtgcttcgtccagagtcaggtccgggttttcaccttgtaaacgaccaacaatgaaaccgatgttcgtggttgcaacagagtgttcagatgcaggaatagaaccagcaacgaacttacctttcatgttgtaataacggcgagcatacagaatcgctgggatagtgtctgtacccattgagttgatcagttgaccgaactcgctctgtgcagcatcgtgagtaccagcttcaccgcgatatgcgaagcagtggttctggaatgcaacatggtcgttgttatcacaggtctcagcagcccatttttcagacagcttgcgatactgccagaacgtcgttgcagttgtgatagttttccaggtttctgcggagatcacactttccaggaagttaggcaaccagtaaaaatccgggtgcgtattctggattgtaaacattgggacctgaaccggagaaagcgttccttctggaagagcacggatttccagaggaagataaccgagatcatgaagagcctcaaagccccaggtttctaccatgccaatgccgatgctggagtcgcaaacctcacgataatcagcaaccgcttcttctttcgggaggttgaagaagttattgttgaacatgtcgataaggaaccacttaataaatccctgaagtccagcaaacatgacacgctggtcgttatcggcgaagtggatgaagtgcttcgcattacgaggggtcatgttatcctgaacaatttcagaacgtttatcatacatggagatgtgtgaaggtttgtaaaagtcagcgaacaggataggactttcttgattaagcatgttttgtttctcctttgtttgtttaatagggcgattgtacgcccacttattcatttgtcaattaaaagttttcggtccagtcgtggtacgcgtagatttcatcaacgccgccttcgtagataacttctttaccgaaggaaaagataccgtgagttacgtaaagaataacacgttttgctccttttgccttcaatgcttgtgccagggcgatgaatgtgcgaccaccatcgcagatatcatcgacaataacacactcacgtccttcaacatcaccgaaaacagcagtcccggtaatttcatttgtcttcaggtcgcgcacttttccagcttccaccagaggaaggcgaagtcgatcggaaactttctgagcttttttacgtgctccggcgtcaggggcaacgataacaacatcttttccggcaagaccttcatggaattccgcaataagagcgtcctgaccacggattttaacgttgttaagcaacgcggcggagacatcgctgtgcggatcatcgacaatgaccttgtcaaacccaagagagttgacgatatttgcgaaaactttgatggataacgcttcaccaggttgcattacgcggtcctgacgtgcatatgggatatatggcaagtgcaaagtgaactgtgcagtatgatggaggccttcaaggcgagaacatgcatccaccaacatggcaagtgccataacatcagtagaatttttaattttcgcagtgatgtctacgaaaccaataccacctttcggagtatgcgccatatcgattctaacctgttcttcaccacctttgaacgtaaagtgatcgacaggaactaccagtttgttcagacgaagttctaaactcatttcatttctcctctttccaagaatgtacttcataaattgttttgttgtgacccatcttggtacgcgtcgtatgttttgtcaaccattttaatttctcaaggttgcttacacaccttgttgtggtcgcccgtgataggccaactgcatcagctatgctatccagcgattcgtggtactccttccgcatcgatttgaagtaatggaactgatgccgcatatataggtacactatcttatcattggaagaggcacaggtcaccgacagtagcttcagttcgaagttgccgtagatgtgcttacctgttgcaatgtaccccatgtcactcctccatagcctgtgctcattttgatactaagcctatgctcaatttgagcacgtaaataaatactatataaaataaataaaacaatactctttaaaaaaaaaacaataaaacataagatctaaaacaagatcttttactacagagtataaatattctatatcatagagtcggtgactcgatgagttggattatcgtatgaagaaaagatgatgtcaagtgttgacatgaactttttaacgtgtagaatctagggaatgttaaaggagattgttatgttttcaagtaaagaaacaaaaattatcggtgaaatggtctgtggtaagccacgacgtaaaccggagcagaccgatgaagagaagaccaagttgatgatgatacgtgaagtgtatcatgaatgtggtgaagatcaaaatgtgtgcgtggtattaccggatggtatacctgttgacaaggtcttcgataacttctatgcttcaataaagtcgagactagctcgacgtaatgtgtgtgtaacatattcaaaggacttgactgtggaacacatcgagaacaacaatgttgtggtggatctaagtgaaatccatgtaacgctctagaacgtgttataaagcgttttaatggtgtggtagtacacttgggttaccaacccatattaaattaaatacagggcctcccagaggctctgagaggtattgtggaggattattttggatatgaagagcattacccgtgatgactccatctataaaggtgcttatctagctctgagagacatcatgaagtctatggagaaaaagtatggtgtgaaactgtacttagatagccgggtagactggggaaagacatggatggatgcttcagtttacattcatggtgataggaatatcgttaacttggtgtgcatgaaacttattgtgtggcaacattaccagaaaatcagggatggaattctgttcgcctacccggctgaggatatgaaatgaagaaagatatcaggaaacctgtcaaggaaaagtttgatacctctgcatttgtgttcacaaccgatgtgggtgtgattaaagatgctctacagcgactgaatgaacaggaggcagatcctgaagcggaaccactgacaaaggatcagatctattggatgggttggtgggagcttaacatgccggaggttgatcgtcgcggattaacacgggtattgacatgtgctcaggaaaatgctgcactgggtctgtataagaaaactacgaagaggaagaaaaaatgagcagacttgcaaaactaaacagaagaaagaaaatgttgaaagaaaagcagaaaaacatcacggctactttccaagtatgccgagaggctatgaaggcaaatcggataacaccttcgcagagacagttgatccgtgatattcttcgtcctgtgctccatgaccttgaaggtgaagttcgtgatgttacacttcatattcaagaggaacttgtaaaaagatatcaggagaatacatgattgaccatgttacgtcagacactcactggtggcataccaacatccttggtttcccatcgtgtgataaattccgtaagaatctgtacggtcaaaaagaagaccgtgaaagtctgtatgccatgaatgcaggtatgattgaaatctggaataagcacgtcaaaccagatgatgtcgtagcacaccttggtgacttcgtgatcgcttacggtcgctacgttgagccacgcactcgtgatattctggaaaagatcaacggaaagatcattcttgttggtggtaaccatgacaaccgagatacgaaacgtatcttccgtgaattcggtcatgaagttgttgattataaagagattaacttcagtactggaaaagagaaggtgcatgtgtgtatgtctcactatccgttcgcatcgtggaacaaagcacaccacgggtcagttatgttgcacgggcatagccacggctcatatacagcccccggtggacgtattctcgatgtaggttgggatgttcatggtcgtcctctgacgatgcgtgaggccgtcctgatgtgcctcaaaaaaccaatctacactgctgaccacggagaataagatgcataacaaagaacgaaatttcatagcacgtaacacggcgaagtctttcttcgctactattcacattgccggggattatgctcaggccaagaatttgtgtcgccattgggttatgcaaggtgcttgtgtgcagattgctccatgcacctatgtttacacaggtggtgtcgaagatggtatgactgtgcggttgatgcagtatccacgtttccagcgtcaggagcatgagatattatcaatggctgtcgaacttggaaaatatcttgctcaggagatgtgccagataagcttcagtatcgaaaccccttataatacaacatattatcaggcggaaggttatgaaaaaagatcttgatcttatccataacgtggcctttttgattagcgagcttgaagaatatgttgacgaactagacctgagcatctatgatgactacagtgaaatgaaatcagcacaaaaggaagtgctcaaactattgaaaaatctcagacgaaggagagaacatgaaattcaacgtagacgatttggtcgctaaaaaactggtaaccaaaaagacttacaccgaaggcccgttcgcaggtctgtctgtgctgaagtataagaacaatgtgttctgggataacctgtggcatactgacccacgcctgcttgagtgccgtggcatggttgttgattcagaagacaacgtgattatctggcctttcactaagattttcaaccgcttcgagaatggaactgaccttcctcttgacaaaccggttatttgttcccgcaaggtcaatggttttatggctacagcggcaatacacaaagacaagcttctcgtttcaacaacagggacattggattctgagttttcagaattggctcgtaagtacctcgaaaaaatgaattttgatctgatttctttccgtgaagattacactttcattttcgaaatatgcgatagcagcgacccacatattgtggaagagaaagaaggtgcttatctgattggtgtccgtgacctcgctttaaacggtgttatggttgaagagcacaaacttgatcgcatcgctgaagtgatcggtgcaaaacgtcctcaatgggatgtccgtgcatttggcgatgtcgttgcagccagtcatgctgttagccacgaaggttttgttgtccgaaatatcgggacagatgacgaaaatagcgaactacttttgaaaatcaagtccccacattacctggcgaagaaattcctgatgcgtggaggtgataacaagtgggatatgatctgggataacccgaaagaggccaagaagcgtattgacgaagagtattacgagttgctagaccatattcgtgagtattactctaaagatgtttggtccgcgatggattctcaaaaacgacgtcaggttgttgaagattacttcgctatcgaagacatgtttgatcgtggtagtcgtttttatgttggggttccaaaatgattatctggcttgatgacctgagagatccaaaagactacgggtatcctgatgccttgtggttcaagacctctcagaaatttatggactttctggacaacaggtcaaagttctatcgttatgtcacagagtggcatttcgacaatgaccttggggaagggtcagaaatggagggctatgactgcctgttggccttggaagagaagcttgtgtatggaaaacttcctgtgcatgatgctaaactctatgtccatacgtctaacccttctgcggcacaaaagttcatgcttgcaaaagagagcttctcgaagtatcgtattacgatcttaagaaacaattactgaggagaagagatggaaaagactctgattatcttacgcggcgtgtctggtgctggtaagtctacagttgctgaaacaatcgcgggtaaagcatggcctgtgtttgaggccgataaataccattatcgggacggggtttacgactggaagcctgaaaacatggctgttgctcataagtggtgtcaagaacaggtacgtgaggctatggtgtgccgtattgcaaaaattatcgtatccaacacttcgacaacagagaaggaactaaaaccctacattgcccttgctgatgagcacggataccaagttattagcttggtggtcgagaataggcatggtaatgattctattcacaatgttccgcaggaaactcgtgatgctcaagagcttcgtctgcgtaactcattgaaattacagtaaggaaagatatgtataaaggaaataacctacgggaatcgttcgaaaattggtgggactctcttagcgatccttggtcaacaccagaagcaaaatctgctgcatgggaagcctggaagttttcaaatttacgagttcttaataaaattcgttatatgaaaggtattaccgagcggtgcaatggttataatgaggctatgaatgagataaataatgttataggggaaaatccatgagacgtcttatcgttataagtggtgctggcttctctgcggagagtggtgtacgtacattccgcacagatactgaatctggtaaagccctgtgggatgaatacgaccttgaggaggtttgtaacatacacgccttccgtggtaacttctaccataaaacgcacatgttttataacaagcgtcgtgcagagttaccaacggtacatccgaatgcggcgcatcttcgcgtggctgagtggtacagacgttatcctgggcaggttgttaacatgacaactaacgttgatgaccttctggaacgtgcgggtgtccctaaagaagatactctttacatccacgggtatctgaaagaaattcgatacaagctccatgaagattctgaagagcagttggttgacatcggttacgatgaggtagaccccgaccaatttcattggtgtaaaccaaacgtagttttctttggtgagaatgctccggcctatggccctatgaatgataccttggagtcattgacaaatcaggatcttgtaattgttgtaggctgttcaaatacagttattaacttcaactgggagttgttccctgcggttatgcgggggaccaaagttgttgttgttaatcctgctattaggtatgatgaacaaatgatgtatgagaatgcgggtgttcttgtatatcgtaccggagctgttgatgcctttaataatcccggccttatcaagatagttgagaatcaccttgaaggtaagacaccattgcaaagcaaggagaaataatgcaacaagtaaacagtacactgtacgcccttaataaagatggttctttccagtgttggaaggtgtttattgctggtaatcaggtagttgtagagtttggcaaggttggtggtaagaagcaacaaaaggttaccacctgtgaaccgaagaacgttggacgttctaacgaaaccaccgcagaacagcaggcattggctgaggcggtttccaaatgggagaaacaggttcgccttggatatcgtgacgatacaagcaagcttgagcaggaagagaacttctccccaatgctggcccatgatgcaactaaacgttcaaaatcaatagtttatcctgcatacgtgcagccaaagctcgatggtgtacgtgctctggttactcttgatgcagatggcttcccacaattcaatagccgtggtaacaaactgtatcctgtaccgcttgattctgagttgtctgaacaggttaaatccctttctgagcattcagggtttgacaaattcgatggggagctgtacattcatggtctgagtctgcaaaagattgtcgctcttgctaagaagtggcgtacaccagagcagatcgaggaagagattgaaaaggattatcagtctgacctgaagcgccatcagaaagctattgacaatggggaagacagttggaaagatttcgatggtgatgtttactctgttgcgatcgaaccagttaaagatgttgatcgttatggtgggtattctagtcttgatttggaataccatatctttgacatcccggtgaatgcaaataaaccttggtatgcagtggaacatacagaccaccgtaaagcggatctggatattgttgcatatatgatagaggaggcccttaatgttcctctcgtccgtgttgtttctggagaaatggtagcagatgaaaaatctgtaaagaattacatcggtatttatatgacaggtggtttcgagggtattatcatccgaaacttcaaaggcctgtatgaatttggacagcgttcctcagaccttctaaaatggaaattgttccaagatggcgaggctaaagtccttgattctgtagaagataagaacggtgagggtgtccttctttgtgaagagaaggatggtacacgtttcaactgtaaaatgaagggaacccacgtagagcgatctcaggaaagaatgctcatgctggtggataagtttattaacttcacgttccaggctagaactgatgatggtgttcctcagttccctgtgggccaaagcgttcgtgaactcgatacattaacatgggagcctgtatactaatgggattttatcgtaaaaaacctgtagaggttgaagcacataagtttgaagggtcgactacaagcgcaggtcagatccgcaaatggatggaaaccggtgtctggaaggattcagagatccatactcgcgacattaggaacttggagatagaaacccttgaaggggtgatgactgttcttcccggtgattatgtgatcaagggtgtagctggggaattctatccttgcaaatcagaaattttccatgcaatatatgaaccgctagaagaaactgatcgggaacctggcaactacccagcaaaggcagtccgtaagggtgacgagatcatgtattgcggtaaggtttataccgtaactaatactggggcgatgggagaggatgttatcctgactctaggcgatggttcccaaatccctgtgcgtcctgatactcaaattatcgtaacaaaggcacagtaatatgatctggtattggctagcgctactatgcgcatcatttgtaacaggaggcggcatttatgccgcttacagattccgaaaagataagcttgatgacttctttgactgggtgtctggaaaggttaaacgtctgcttgtaatttgggctgtggtattgtgcctggtaacgctggcccttaccaaaccgttgtggaatactatgacctgtcagtttgatggcatagctgcgaacacggagaccagctattcatggtacaaatcaacctgcctgtacaagagtaagacaggggcatggttacctttaggtatcagtcgcgatcaaccacaaggtgatggagatccatcccattagaattatttaggagatttaatgaaagaagcttacgaaactctcaactcaatgctgcgtccaacctcacttgttaagtatgcaaaacatgttgtagattggaattctgtcgcagcctctgcaaagggcgaatttacaccattggaaaagcagtgggagtttgttggagaggagttagaagaaactattaaggcattgagcgaaaatgaccgcaaggaagtcattgatggggcatgtgacttatttgtcgtggcgtcatatgcttattggttgagtaataactattcactgtccttaacttacactcctgatcttaagttttctccgggtaaagctttggatgcttttgcgaatgaagattacgaggagatgcttaaattgagcacggctttattgtttggtcttgatatgcagttggataagaacatgagtagcgttcttgagtctaacgactctaaatacccaacacttagtgaagttcagtctttgcataaagaccttgacttgttaaaagcccttgaggcagaatgcacttgtatcgaacagcgtaacggtggacgttatgaaggtgttcatttctccattgttgatgggaatatgaaggaagaacctcgtgtcgtattcttcgacaagggcggtaaaatcatgaagccaggaactttcaaaaaaccaaacattattgtttgacaatcgcatcggggtctgtataatgaccccatcaagacaaaaggagaactaagtggaagaaaatattgattactctgaaattaatgccttggctaaacgccttaaaatgacaatcgtgaatcgcggagcatcttcccgtcctgttatccgcttcaccatgaagcgtcgctggggcggagtaaagaaatacgcttatgaatgcacactcggcactctggtcgcgcatgtaaaccagatcgagagaatgggcggaaaaattgttggaatcgacaattaaggtttgacaaataaaactgaacggttatactgaccacactaaactaaacaaaggagcaatatatgccacgtatgccaaaaatcaaaatcgaactgatcacctctcttccgtctgacccagttcagcgtaaacgcctgaaagatagcgtaactgaagtggttgatctccagcgtcagatcgctgatctgaaagaccagatcaaagatattcgctctgttgagaaagaaacgcataatatctctccaaaattcttcaatagtctggtgaagcgcgagtatgatgttcgcttcgaagccgaaaagaaaactgctgcattagaggctgaaaaagaagtcttcactgaggcagacattctgtttggtcgtggaaccccaaatgttgcacagactgaagccgatgatggtgctgaggacactgaataatgaaatactaccttaatggtgttggcctatttgtcttcatctgcgtcgtattcgggtttggtgttccaactctggtttctgccaaagatacaatcagtgttattggcgggtttgccttagtcttcactgccccggttgtcgtgtggtactggttgcgtaaggtcttcattccgaagacaagcgctgaaggagatcgataatgttgctaaatctgaaggcggcaacttgggaaaagttgcagcacttggcaaagtccaaaggtaagtctgcggcatcttatgttgcaaaaatcgtagatgaccacgttgatgataacgtaaagactgagtataaaatcaaagaggagaaacaaactaatgcttaagaatatcaaacgcgtagtatttgctggcctgatcgccctgggtgcaattggtctgactggttgtgaacgtgcaactgttccggcgggttatgtgggtgttaaggttgacctgtatggtgatgagaaaggcgttcagcagcaagaagtgggcgttggtaagtattggttaacctggaacgaagagatctatcagttcccgacgttcaaccagttgaacaactacgaacaaccgtttaacttccagaccaaagattctatgacggttactgcgaagatcggtgttgagtattacgttgaccgctctaaggttaccaagatcttccagacctaccgtaaaggcgtccaagagattaccgatgtcaacattcgtcagaatatctctgatgcgttgatcaaggaagcgggtacaatggacattggtacactggctggtgatggcaaatctcagcttctagaccgagtgaccaagaccctgaagcagaaacttgacccggtaggtatcgttattgtgaaactgtcttacactgatgaccttggttatcctcctcaggtaactgcgtccatcaacgctaagatcgaagcgactcagaaagcgctgctgcgtgaaaacgaaatccagcagaccaaggctgaagctcagaaacagatcgaagccgctcgcggtgaagctgaatctaagcgactgcaagctcagggtgaagcagatgctaaagtagcactggcaaaaggcgaagcagaatctatccaactacgtggtgattctctccgaaaaaacccagaaattatgcaactggaagcgatcaataagtggaacggtgtgaccccagtctacatgaccagtggttctcagaccccattcgttaccttaccagcaggtaagtaagagttgacaaaaggcccggtgatagactatcatcgggtctcaacttaagaaaggagatacaaaatgatccgcacaaaaattcttttagtagtagcgctgatctctccccaggcattcgccacagtcaacacactttctttggtggatgaatacactgatggaagctccaaagtctgcatctacagcgacggtaatcgtacagagagtgttgtgaaagaaggtgctggctcatgcccgtctaaaaagactttccactaaggagcatatgatgtctgaaaagatgattcaagtacctgcctccattatcgcagaactcgtgccgtatattaacagcggactacgatcaactgctgatgagatgggaaaggctggacataccccatccgaagtaatgtctgaggattatgaccgttttaactcccttcgtaggattctgagagaaaacggagtcagctatgcgagtaactgataaatacgtcttcttcttcacttaccgggatatgttcagtaatcactaccgccaagttattcctattcgttgtggtggttatgagtttttcactgtagaacattacatgatgttccagaaggcaatgctcttcgatgacaaagaaattgcttcccgcatcgctacggttgataacccgaatgaggccaaagctcttggtcgtcaggtaaaaggtttcgacaacaacgtctgggaagagaataggatggatattgtgacttcaggccttgtattgaaaatgaaggccaacagatctgtcctcgaagcggcgcttgggcatcgagatgcagggcgtaagtttgtggaagcctctccttatgatgccatctggggtgttaaattaaacgaatatgatacacgtatcgatgatcctgccaattggcgtggtttgaatcttctcggtgagtgctgggaacgggctattgatattgttgttgctgcaacgtggaggtgacttgaaattagagatcgaactggttccaaagacagcgtggtttactaatcttcgatctcatctcaccaaagcccagtgggatgttgtcagaaagaaatgttatgcaaaagccaattattgttgtgaaatttgtggtggtaaagggactaaacaccctgttgagtgtcacgagatttggtcatatgccgacagtaccattaccttaacgggtctgattgcgctatgcccctcttgtcatgaagtcaagcatattggtttggcagggatccgtgggcgtggtgaaattgcccttcgtcactttatgagagtgaatgaagttagtcgccatgtggcagagaaatatgttaaggaagcgtttgatttgtatcatgaacgaagcaagcgcgaaaagtgggaattggatgtccggtatttggacgagtatttgagtaaagattgagagggctagtgggatatccgtatgataaagattggaaaaataaagtcacaaaagactgcgtattagctttggatctcgaccagacatgctttgtgtcagccgctggtgctgaaaagcgtacaattgaggtcactcacattgagtctggaagaacaaagattttcaaaaacaggactgagttttggggatcgacaaagaaagttgtcggtggatggatcaaagaccaaaacatgaacatggaggcgaaggcaaaggccgaaggccgagtgtttgtaccgtggggtagggatgacttcacgattaaagacattcaggaaccggaacctgtagaaaactgccttcatatcctgaagacaaagatcaatgctatctttgaacaccttgagatggaaagcaatacagggatgggtgtacttggtggtgagggtaacttccgccttatgctcccagctccagagcgttacaagggtaatcgtgaggatacattacgcccactccttcttcaggaaacaagggattatgttacccggaagtataacgctaaggtgatcaatggtgttgaagcagatgactatctgtctgttcttgcttatatggggtgggagaattaccagaagaccgggaagttcaactacatcgtggcatcgtttgataaagaccagaaaggaaaccctgggcttatcttcgatactatgcgcgattcagaagagaagacatggaagcacccgatccctatgttgatcgacgattcgatgggtgagatctggatggaaggtagcaaggtcaagggatgggggcgtaagttcttcggttaccagatgctttgcggtgacagttcagataacatcaagccttaccagtgtttcgatatcgctggacgtttcggtgatacggcggcattcaatctgatcggacaccttcaggatgagaaatccatgtggcaagcgatcattaaccagtataaaacctggttcccgaacggtgttgagtttacttcgtgggacggcacacaacggaaaatgagtgcaggccagtgggcatctatcatcttccagatggtctacatgaaacgttctgcaaatgataagacaaccctttcaagcgagttacgccgtgtgggggttatatgattgataacttaatcatgcaggcagttatgagggatgctgaggcgctggctgttcccagcgtcaagggtaaattcttagtcgccacagggttgtggcgcatggttgagtctggtgatgattgctatgtgattttcactgatgactatactgatccgaatgttgcattcaccgtattgcttctggatgattgcgagctggtagaaggtgagaagctgttgatgttaacaagcgttttgctagacactcaagaattctcgcttgttgtctttaaggaccaaaatgactcggaggtaaccgatgaagctgatgtcggttgatcagagtcttagccattgtgctgttgtcatattcgatgacggagtgcctgtttaccgggaaatgatcagaacaggctcaaacaatagcaagagcaagaaaaacaaggatgttatttattttgacaatgttcatgaacagattaggttcattgttggcagaatccttactttggctgaagaacatcggattgacaaatatgttatggaggcccttagccttagttctatcggcagcgccactcgggatttggctggtctgttctactgtattgtgtacgggttgtatcagtcagcaattttggggtatcaagcaatccatactgtagcccctacctctgtgaaggcttatgccagagcacttttgcctgaatcagaacgcacagtcgttaaagaaaaggttgacaaaaagaccgggaaaaaggtatactcaacaggtcaggttaaaatggaaaaatcgcacatggtgagagcagtggattgtgattttcccggttggcttgatggaatgactcttgccgccggaaaggctgactacgcagatgcatatttgatagggaagaagttcttggaggatatatccgtaggaaaagaataaagagtcgagcatccaaaccaaaagcaaggaagaagccagtagttgtgccattaacaccggaactttgggtgaaagatgcaaagcagattgctgctttcagaaacaaattgattctggagcagcaagggttagatcctatactcggcgagccacttcgcaagccgtgcttggatcatgaccatttcgaaggtaaatgcagaggtgtccttagtcagtgcgtgaatacttttgagggatatgtcctgaaggcttggatgaagtacgtttcagagaatactcagacgtcgttatccaccgctcttagaaatttggcagattacttagagcaagacttcagtggctatccgcttcacggcgggtttaagaacgatatgttgaagtttttgagaagatgcaccaacgagaagataattgaaagagctaaggcggaccttggcataattatccccgaaggtactcagaaacaagacagcctcttgctataccttacagagttcgtcaagcagacggaggaaaaacatgccaaagaaaccacttaaattcttttacagaaattggcgaggtaagtgcggatatcgtactgtagaagaacccgtcatgtggtatgggtctacccagtatcacaagaactctcaatggtttattagaggttatgatctagataaacaagactttagagatttcgctgtgaatgatatcattgaattcgtccgagaggtgtaatgctacctgtagataaaaagattatagaacttcatgaaagcggaatgagtaaccgtgaaattgctcgcacattccttggaaaagagtcgagagagtcatacatccgtttggttcttaagcgtcatagcgcagagtctacgcctttaacaaaggccttagtatcggactataagaaagccaagatcctgttcttagatatcgagactgcaccgctgaaggggcatctctggagtctatggcagaatggaattgggcttaaccagatggtttctgactggtacatgctatctttcgtagccaaatgggctgaccaggacgaggtcatttatcgcgatatccgtgataactacgataaggaaagtgatgcatctatccttcaagacctgtgggacttgcttgatgaagcggattttgttgttgggcataatgtccgtaagttcgacattaagaaggtcaatgctcgtttcctattgaatggaatggataagccatcaaccttccgtattatcgataccatgcttatcgccaaagccctgtttggattcacctccaacaagctggaatatctgaccgatcgcctgtgtacgaaatacaagaagtctaagcacaccaaattcccaggacacctactgtgggatgagtgcttgaaaggtaaccccgaggcttgggatgagatggaagagtataacaagttcgacgttttatcgaaccaagagttgtacgaaatcttcatgccttgggattctcgtctgcctaacttcgatctgtatgttgatggtgttctggatatgagcgagtggatagaggatggtttccattacaccaatcttggcaagtaccaacgttaccgtcacaaggtcaccgggcaacagcgccgtgggagaacaaaccttctctcgaaagagaaacgagcgcaactgctgtcaaatattttggtttaactttaagggcttcggccctttgcaaaggagatcctatgggaagagaaattgttgttaaagttcctgatgccgcagatgatgattggctgcgagagcagatcgaatccttacgtgtaaggatcgaggctgttgtagaggttgaggataacgaagaaagctttgataagttaggtgcttgtcttgacatcattgatgcactccaacagtatacggggtactaatggatattattgttctgaatgctccaccacagagcggtaaagatgagatttctgcgtacctttgtaaaggtaacccaaacatcaaccacgaagaggtgaaggaactcctttttgaggtcgctattcgaagtgcaggtatctctcgcgagctatgggactctctgtacacgcgccgctacaaagagaaaccaacaccttacctgatgatagacggcttctttgtttctccccgcgaatggatgatccattgctctgagaaggtaatcaagccgttgttcggaaagtcagcattcggtaaagctgctgtggaaaagctgaagcagacctatgccaacgacgaggtgattgtattctcagatggtggctttgctgaggaaatcaaagagttgtcagattatgcatactcgactggtggtgaattcttccttgcacgtatccaccgaaaaggttatgattgggggaatgacagtcgtaactggttataccttgatggtatccgaggtcatgaacgtgactttgataacaaagagggcgctatgatcgattgtgcagaagagatccttgagtgggctaggtcaattagctatggagaagatgatgcgtaaaccgatgaatataggtattgatgtcgatctaacttttgtagattctggtactccttggcttcattggttggaactgatgtatggcgttaaggcggactgtagtttgccacccccgaacccacaggggaagacttactataatctttctaaatattttccacccgcgaaggtgaatcaattacctccgtatgagttctgggaagatccttatttgtacgataggctgaaaccacgccctggcgctgttgaagcagtggccgcatttgctgaagctggtcacttcaaccaatttgtatcatactgcaaaaagggacacttttcgtctaaggtacgcttcttgaaacgtgagacagaagagttcttcagccttgagccgggttctggtcatggtttttatgcgacgaagaacaaagcaggtcttaagcttgacgtcattattgatgatcgcaatgaattcctgaatcagttcggagatgacgtacttaagattaagttctggactccgtatgaccaatctgaggagttgaaagtctcgattgaccttgagacatccgactggagtcatattcaggactttattctggacttctcctgatgaaaagggatagatgcgagggcggtgatttcatcgcccgtcagggtaagtggtacgaagtattcgatgagaaggataatttcgtgtactcattcaaagcgacaagcgacatgtgcaagaatgtgcttaaccgctacttggtgttcaaggcagaccttgatccaaatgttaactacaaaattaagagggttggaaaatgacaaaggatgaaatggcggaacacatccgtacacaagcaacggctcgtgtgaatcgtgttattgaaggtatgttcccaggcacaggactgactgcggatatcatggggattgatgcggattttaataaaggtcttttttatgacgtctatctgaacttattctctctccgcgagctggaagagattattaccccccagatcaaatacaaagaccgtcttgctgaacttgacctgttagttgaaactgccgtcgccgctcgtatggctgaaaaccaagacaagattattgagaaattaggagcaatgagtgagtaatttgatttccgtaaaaattgtagctgacagcatttcaccttctggttctcggatcacaactttcgagcttgaatatccacgaattattcacagtgagttgatgactcaccgactgttaagtcggaatgcgatgagcagtcgtgctattccgattaagaaaatgatcgagcaggttcagcaaaatcctgcaatgcctgtgaagtttggtaagaaccaacctggaatgcaggatgccggggagcactcagcacagcttggtgatgggtactcggcagaagaatggtggaaactcgcaggacttagtgcagcccggtttgcagcagaatttgcagatgctggttatcacaagcagattgcaaaccgccttctggaaccataccaaagaatgaagacagttgtcaccgctacagactggaataatttcttctggctgcgggttgaccaggatgctgacccgacgatctatgaactagctaaggcaatgaaagaggctagcgataattctatcccagaccctcttgaaccgggacagtggcatacaccatacgttgatcacgtttatggctttgaagatatcgatgacaaagagtgtgcagtatttgaaggctattgcgttcttgacgaagagaacaagcctgtaatgctgaccctagaagaggctttggctatttccgcatcttgttgtgctcaggtgtcttatcgtgttctgaatacgagcaaagaaaaggctctggatatctatgagaagttggtgagtggtaacaaggttcatgcctctccattcgaacatcaggctacacctatggcagaatacagggaaattgagaactctgattatttaactatcggacatattaactttccccgtgatccaagctcttgggaagaaggtatcacacacgcagatcgtcaagggcaactctggtccggtaacctgcgtgggtggcgacaacatcgccagttagtgcctgacaatgcaatttcaggttgacaaagatatcgttaattcgtatcttagaagcatattaattaggggcgattttgccccttgtcaggcagaatggagattacatgagtaaagaaaaacgcaagccaccccaacacatttcggtcaccattgacttcctgagaacggtcccagggtttgatgtccagaaagataatgacctccgcgctgccttatacgcactcggttttcaggttaccgataaagatgggaatcctaaacacgtaactgtgttccaaaacaaaaatgtaagatgtgccaacatgccatcgacgtatcgtaagacaatgatttttgtaggagaaatgcgacccgattataaatacgcgaagatatacaacggtgttgaaatccttgatgtaggggtttattcaggcagtgatatggaatttgttttagatcttccttacgacatccctgtaattgaaaaagttaacacccgcaagtataccaagcgaggtgatcgaccagagacatttgaaatcactttcgatattgaagacgaagctcgtctgggcgatgtatttggcctggaggacgaatgagtaaagaaaaaacgaaatggaaagaccgtggcttcgatgataagcatcattatgccgggtggctctacttcaacgatttaaccgatgacagtaaaatgtacgacgatgtttactatgatgagttttctggtaaaatagttaacatcgttgcgccagatcaaaacgagaaagacgatcaggatgttgacgaggcagatgcgtttttgtctcaatttgaagaagaataaggggaaagtttgatcaatacagttgtgaagagtgatggtagtgtggttccatttgaaccagaacgtctaaacaaggccgctatctttggtgatgacggtaatggtaactggtcgtatatctcaatggatgcatataagcgactgtatgacggctgcaccactcgtgaagttaaccaggcattgatcgacgcctgtgtgagtcgtaaagacgaagcccattcacggatggctgggcgcgtcctgattggacaaatctacaaggaagcttttggcggatttaagaaaatcccaagccttaccgagttttaccaggacatggtgatgcgtgggtactgggaagaaatgggctatactggacctgagctgttaaactttgatcaagtcattgaccacagtaaggacctgagttatgggtatgcggttctgaaacagttccgggataagtatggtatcaaagataacatcaatgatatcctgttcgaatccccacagatgatgttcatgggtattgctatggctgttatgaagaatatgccattatcccgtaggaagaatgacgtcatcagactgtatacgtatctctctgatcttaaaatcaatgcaccaacgccgtacctgaatgggttgcgtactggtaaaactggatatgcatcctgttgcattatcaaagcagacgatacagctaaaagtattggtgttgcccgtgaagtggcgtacactatgacggtagcacaggcagggatcggttattacctgtcctcccgctctatcggcgatggtgttcgtgacaatacgatcaagcacatgggtaaactcccgtattaccgtggaattgatgttggtgttaaggaaaatcgtcaacaatcccgtggtggttctgcaacggtgtctttccttgcattagacccgcaagttgaagaactgatgcgcctgcgtaatccgatgacggttacctcaaagcgtatcaacacgatggactattcaattggtgtcaatcactcgttcatgaatcgcgtagctaagaatctggactggatgttggtgtcatataaggatgttcctcagttacatgagggtatgttccgaatgacaatgcaggagtttgatgctgaggttgcccgtgtagcagcagatactaagattccaaagacttgggtgaaggcgcgtgatctggcaatggagctgatcactcaacgtgcagaaactggtcgtctttatgtttactggcctgacgaaatgaaccgtcatacgccatttcttgagacaatctattcatctaacttgtgtcaagaaatctgtctgccaacaaaagggtatacagatatgaggaacattttcaacccggctgtcgatgatggtgaagttgcattgtgctttatcgcctctcttgttgctggtcgtatttctgaagaagagtacgaggatgttgcttactacaccgtcctgatgatcgacaacgttatggatatcatggattatccgtatgagaacatgaagtacacagccgaatctcgtcgttcgattggtgttggcctgaccaaccttgcacactacatcgcgaaacacaaagtcgcgtatggttctcctgagagcaaacagttagttcacgatctggcagaactgcatagcttcagtctgcatagggcaagtctgcgactggctaaagagcgtggtgttgctccgtggatgaataagactaagtacccgcagggttggttgcctatcgatacctataataaggcagttgatagtgtcgtgaagaatcctagcctgaagcaggactgggaaactttgcgccaggaaatcatcgaaaatggtggtattcgtaacagtgttctggaagcttatatgccgaacgaaagttcatcattggctaccaacacaacaaatggcctgtatccagtacgtgaccatgtgatcttcaagaaatcccctcaaggctctgtgctgtttatcgtgcctgagtatgaagagctgaaggaatattacacatcggcttgggatatcgatacgaatgacttgattgatatctatgcaatcattcagaagttcgcagggcaagcaattagtgcggatctttacatcgactatacccagttgccggatggtaagatttccatgaaacaacaacttgggtatctgattcgcgccacgaagatgggaatgaagacatggtattacctgaactccaaggttggggcgggagactccctcactgaggaacttcatgctaaagcaaaagctgaggaagagacaagggctgttgcaccacttatcgccggggatactgaagatccttattgcgaaagttgttctttataagttgtaggggcttcggccccgtttttgaggagagaaaatggcagtttttaacgtagaaaacaccgcgcataagaccggggactacccactgttccttggtcaacagatggggatgtatgactccatcaataaaaagtatccgcaactgtttgacctgtataaaaagcagaaagaacaggactggtcagaagatgaagttgaactgagccagtctatcactgactttgctacttgcagcaaatcgacttacgacgtcatggtgcagaccctgatgtggcaatgggaagctgatagtgttgcagcacagtctatcatctgtctgtttgcaccgttcatcacgaatagtgaactgttcgccatgatgatgaagcaatcagagattgaagtcctacatgctctgacgtattctgatatcgttcgtcaatgtctgcctaattctcgccagatcattgaagatattcagaacaaccaagcagtccttgaacgctctggagtcattgtcaaattcatgcgtgaattagagatcctcggtgctcgataccgtattgacccggactctgtcgacaaagagggaatccgtcgaggaatcctgagagctatgttctccctgttggggctggaaggtattgaattcatctctagctttgcctgtacgttcgctcttgcagaacagggtgtatttgtccaggtggggcagctagtgcagaaaattatgttggatgagatgctgcataccaagatggatttcggagttatcgatatccttctgaaagacccggtatggaaggccagttttatcgcaatcaagcacgagctgaaagcaattctggatgaagttcgtaccaatgaatatggttggggcgattatctcttcagtgaaggccgtgcgatcatcgggttgaacgctccattgctgaaagattggactgactggaactgtgctccgatctacgattactacggcattgaaaaagatttcgtagcaccaaaacgtgatcctctcccgttcatggatgtttggatgaatccttccaagcaacagaatgcgaatcaggaacaaacaaacaccgattatcgtcttaatgcgacagtcaatgacgctgaagacgaagtctgggatttttaaggagtaacaatgaatctgaagaattccacctttaccatttatggtaaggagaactgccagcactgcacccgcgcgaaggagttcgccattgcaaacgggatcgagtatatctatctgacactcgggaagaattacaccaaggaagagctggtggagcagtgcgccccggttatccctcgcaccgtcccgcagattttccgtgagacggactcctcaacggagtacattggtggcgctgatgacttcattgcttttgtgcaaaaacatatgaaatcctgttgacatagcaaccttctgtctgtatgatttatgtaatcctgccgagaaatctgtccggcaggaaatttagaggagaattcgaatgagtaagaaagcactgcgtaaggcatataccaaggaactggctctggaactgcgtggcaaaaagccgaagaataaacgctcttctgatgaagaacttcagcaacttgcagcagacgctgccgctcgcgggggttactaatgtcaaaaaaggccgcagttgtaaccactgacttacgaccttctctggcaaaggagtttgtttctctggtgtgggaccgactgatcggagattttgctactggattgcaggtgcaggttgaaagtctccagaacatggtgaagggagagaaagacgtctattttgccaaggaaataaaggagaaaaaagaacgccttcgtaaaactctctctacagaggttcaacagaaagtgtttgataaattggtctgccagttggcagaggctttgacagaagaagagctgagatacgcgatcttccaagagaagattacgatcaagattcatggggtagcctcccagctcgaagcggcttttgaagaggcggtgggagaggcctaacctgaaaaaggaggtcttttgaaacttacgctggaacaactcaacaaaatatttccgaatggcgcgaaggctggcagaaatgccaagtttattggtcctttgaatgatttgtttgagaagggtggtattaatactgtcaaccgcattgccggattcctttcccaaatcggtgtggagtccgcagagttcctgtataccagagagcttggaaacaatgcctactttaataagtatgataccggaccaattgcaaagcgacttggcaatacaccagaaaaggatggtgacggagctaagtacaagggacgtggtctgatccaagtcaccgggcttgcaaactacaaagcttgtggtaaagccttagggttggatctcgtcaatcaccctgaattacttgaacagccgaaatatgcagttgacagcgctggttggtactggaacatgagaaacatcaacgccgcttgcgatgctgatgatatcaccaaaatcaccaagctggtaaatggcgggactaaccacctcgcagaaagaaccgcatactacaaaaaggcaaaatctgttctaacctcttaaggagaaccacatgggaagaagcaaagaggctcgtgcaaccaaactcagcgttcgccagcaacaacgtgctgagagacaagccaagcaccaccctaaattcgatgaggaaaggaatagcgctccaccgctgactcctctgaatgacaagcagcaagattaccttcacaagttgcaaacttgcaatattgttatcgcaaaaggtatcttcggtacaggtaaaacttacctggcatcggcctacgctgctgatctgctccgtaagaatgaactcgacaagatcattgtcgctcgcccttatgtgcagacgggtaaaacctccggcttcaaaccgggaacatcgttggaaaaactcttcccgtatgttcgtaacatgttagacaccatccgtaaacgtatgggcgacggtgcctattacaatgcgcttaaagatggtctgaatgggcgtattgaagttcaggaattggaaagcatccgtggtcgttcattcgatgaaagaagctatctcctgatcgacgaagcccagcagagtaccccagaggaaatgttgagcatcatcacacgtatctctgacaactgtacactcgtggtcatgggggatgcctctcagaaagatatccacggaatctccggtctggagtgggtggaagatttcctgagccggaacgggatcgcgggtgtgggtattgtaaacttcgacaacccagatgatgacatcgtccgtggtggtatggttcgtgacattgccaaggcgttaatcgccgaccgtgcagaaggacgctatactccactggcttcgtaacggaggattatggcttattatacaggcgtggggtcgagggagacccctcctgaggttatcagcatcatggaagatgctggtttccgccttgcaaggtgcggattcaccttgagaagtggaaaagcaggtggcgcagatgaagcattccaggtcggaatgcaaaaatattacgaatctcttgacaatgggaagcaagaagagtatcgtacacatttggcggagatctatatcccctgggatggatttgcatctgacaatgacaatctctgggatttctgggattatcctttagattatcttgattatctgattcccgaccaaaaggttgtacgtgaggaactggttgaggagattcatcctaattttgaagctcttaaaagaaaaagaggagcttttgcgctccattctcgtaatgtgcatcaagtcttgggggccaatatcctcgatccacgtccctctgcattttgtttgtactatgccaaagaagataggaacggaaatcctaagggaggtactgcaaccgcagttaatttagccagaaagtacggagttcggattcttaacctgaacacacctgataaactagccttgttggagaggttcttaagatccttggaggaaaaacgtggcatccagatttcgcgataagcttaataattcttattgtctcgttaaagttgatgggcagggctggtcagttggtaaaatcggtaacaaagtgattttcattacttacaaggatggcgggatgaaaaacatctgtaacacagacgatactgatttattcagatacttcctggaatccattgagtaccaaagtaagagagagttattcgttggtgacaaggtcaacgttgacaagttcggaccgtactatgtggtagatatcggtcaccgtgagaaagacgggagtattaagtaccttatagctcgataggaggagtatgacagttagtattcatgggattctttcccatcggagactgatggaactgaagaattgtggagtcgtcgagcctgaatttttcgagtccgaggtgacaaagtattacaatctctatctaaaggttgtggctgaatcactttatagaatgaatgacgggttctttacccggatgatttatagccgttccgctgccgagcgggatgcctcttggatgttcccggatcgtcgtgacctgttggaacatttgatttacctagatggaaaatctcagtacgtgagtttgaccaaagaagagcttaaccactttacgctgttgcatcaagcggcagtagcctcagaacgcgccaagagggtactcctgtgctttaagtacagcgaccaagtccttgtggatgatgattcagggttcaatatagactggttgttacggaatgcatatacattacgacaactgattgtagacgcgaatggggagacacaagatgcagaataacgacaaaaagaattactttggctttggcggtggttttggtggggaaggttctttctgctatccaatgccctctcatgagcatgtgatctatattcatgatttggattatatggaagatcatttcaataaattgcaacaaatacgccaagccaacccagacgatatggtgcgtgttatcatcaacacttacggtggacgtgtagatatcgcaatggcttatgttagtgcgatgcgcgagagtcaagcaactgtagttacccatgcagaggggcaggtgtgttctgctggaacaatcttatggctggcttctaaagagcgaactgtcgccccaatgacggaatttatgttccataactatcagggcggggcatttggtgatggggctaatatttatacccaggtgctgttctataaacaacacttcgatcgcttaatcgattatttctacaaaggtgtattgaccgacggggagatcaacacaatcaaaggtggcggacaggtgtggctggatgaagttgagatcacgaaacgaacccgcgcagtgattttggatgataaaaatatcgaaaggatgaaatccggtaaaaatccgatcgtaacccctgttggtgtgaaagatacccagaaagaggacaccgttactggagaccctgaccgaagtgttgtcctgaaggtacatgtcgatggtgagactttctcgttggatgtgagaaacctgaaggcctctgatttcgatatcttcaacatcgatgagctgcaaagcattctgtcacaggttggggctattgcacaaggagaagaaaaggcactggagattacctctcgtgatcgccaagcactaatcgaagctatcctgaccgcaggtgaagttatcatcgatacctttgggaatgccgagtaatgagtgctcccctgaagaaaaagggggaacgtagggattatgacgtctatgagactcctgaatgggccgtacaggcccttttggatgttatccctattaacccctcatggacatacctggaaccttgtagagcgtctgggaggttctataatcacatgcctctcggttcagcttggggggaaattcgtgaaggtgtggattatctcaacacctattatccaaatcatgtggattgcatcatcaccaacccgccatattcattggcccaagagtttgtgacaaaagcacttgacgatgccgatgtcgtgattatgcttttgcggttagggttccttgagagtatgaagcgatgggaatggtggcaagagaatcctatcactagtctgatggtgttgtctcaaagaccatcatttactgaagatggtaaaacagacggaagtgggtatgcttactttgtctgggatcgaaagaacaggctgaatcttaagccattttattttttggagggacaagacgatgagtgccgcaagcaagatgcgagggatcgcagaaatcgcaaacgcagcaatcccgcccgagatgaaccagttgtacgacaacatggtggaggggattcaccaatgtgccaagaagggacttttggggatggggatggtgatagacctgccggatcacctgcttgattatttgcctcatattattgctgatcttcgtggtggaggtttcgaggttgatgtcgtagaagttgaaccctctatgcaaggcattagagcacgattgtatattacatggtaaacccgcttcggcgggtttttttagtttttgtgcttgactccctgcacagcttcaattatgcttctcgtatcagaggagattgctatgaaattctacatttatcaccgtcctatgcataccatcaaattcaaagagtacatgggcgatctgatccatgtttcttgtgaagagaaagattttagcccggatggggagcaatggaaaattaaacgttgcaatcgtcctgaggccgtgtataatcgattgaacaaaatgctagcttctggtggcgtcccttcagatggtatttatccactatccgacaaacgctcacttaaggatctggtttcttatatgaatacttgggggagacacaatgattaataaaatctataccgttgttagagatctgtgcagtgaagttgtgggaacatcttctactgttggacaaattgtaacagcagtcgtagcaatacctgctgggacagagatggctatttattccgaggataagttgtgcgggactgcacgcactagtcgggatgtctacttaaccacgggcggaggatcaagaactttacactttggtaaggttgttgatcgtacattcgtcgtgcgtattggtggtacagtgtacgaaggtaacgatgtgtataccgcagaagagctggagattactgaatgaatctttacgcaaagcttactaacccgaatgcgggttggccttatgatgagaaacgggcaaaagagtttttgaaaactcatgatgaggaagaaattctctctgtgcttgaagttgctattggtcgtagcagcacagccataactcttaatgagcatggaaacggctggaacagtgttcagtttacatttttcgttgaaggtgaaaatggtcttgaagagtacgatatcttcatgaataaaaacaatcttccccaaatttataaaacttacgtgatatggtgatgctatgaaagtaactgcatttgtgaaatatgatctgtatccgtattacactgttgttttgggtgatctgcaagagaattttgatgtgaaaacggtatctggcacatacaatcgcgaaaaggtcctccatgtgaggccgtcacatgagatagatggtcataggaatacccttatttccattaaaaaagaccacgatcttcttttacggaaattaaaggttgacttgttgaagaagaacggtatacacttcatcaacacagacaatttctaaggagaaaagatgaaagtatatctggtaggtggcgctgttcgtgatggtctgctgggtcgtccagttcatgaccgtgattacgtggttgtgggtgcaacacacgaagagatgattgaaaaaggtttcacccaggttggcgctgctttcccggtgtacttgcatcctgaaaccaaagaagaatacgcactggcccgtactgagcgcaaaacgggtgagggccatactggctttgagaccttcttcagcccggatgtaactctggaagaggatttatcgcgtcgtgacctgacgatcaatgcgatggctaaagacatggagacaggatttatcattgacccgttcaatggtatgcatgacctgtcgaatatgattcttcgtcatactacgtcggcgttcatggatgacccgctgcgtattctgcgtcttttccgtcttaagtcgcagttgggtgagagttggtctgttgatcatgaaacatacacacttatgtttaataatcgtcaccgtcttgcggagattagccctgagcggaaatggaaagaaatggaaaaggccttaaattccaaaaacttcaataattacgcctaccacatgtcgattatgggtgaacttccagaactggatgccctacgtggggtagagcagccaccagaacatcaccctgagggagacgctttcattcatacgttgatgtgtctgcaacaggccgataaaaccttttgctctcctcaggtgaaatttgcggtgctgtgtcatgactttggaaaggcgatcactttccgtaagtacggtaatctcctcggtcatgaagaggctggtcttgatcctgtgcggacgctgtgcagtcgaattagagttcctaacgaattcagggatattgcgctgtacgtgacagagcaccatactcgtgtgcattgcatttttggccgtgggaataataaaggaatcaagccacgttccatgatgaagcttttcgaagccgcaggtaacgtggctagtcagaagacacaggacaaggtgtttgccttagcagacgcttgtttctgcgatgcccgtggtcgtggtgccacgcacgcagataaggaatatccacaaggaaaaattctccttgatgctttcgaggcggttgtaaatacggacagcaaggcggtatcttccgcaatgctagagaaaggcaaaagcggtaaggagatcggtgaggcgatccgtgttgcacgtatcgatgcaatccgtaatgttcttaaggagagaccatgaaacttgtaagtcacgaagattttaacttgtggcggattctaaagaatactgtaggtgcgaaggaagagtatgctcgacttgtggcgagatgtgactaccccgcttgggaattccttaagttcttggaaaaagaggcgagcaactttaggaccacaaatgaagggaaaaggaaatttcttgtgtggaaaaatggagagcttcctttccgcatagagaaggtggaaatcttcgatataactgagtatgggactcatcactcaatcagtttcaaaggaatttcttgggcgactgagtttgagaaaacgctgctcaaccatgcgttagcaagacttttcaacctggcagacaggctcacggaaaaagatgaaaaactgcttgaacttgagtctttcaaacagaccagaaatgaactcgggaactggctggagtcgcagaacaatgcctaaggacaaagaagagtacacctacgagaaacatcatttctttctggacaaacatgcagggaagcaagtttgtgcatggtgcggtttagtagccctgcgtaacaaggccacagattggtgtatcgaaaaaggttgtaattatcgcttgcatccaagctacaagggtgctatgtttaaatacacagagttcttcaaaaaaggatagaaaaatgaattatcttgatgacgttgtactccctgtatggagatttatctttaataacgcagccttgctggttgtcgttctaagtgtcttggctggattgtgtgttggtctcgtttatcgtgcagaggacgacacagtatgggataaatatggaattccagcgttaatagctgttatgtgcggtttattccttccggtaatcatagggcttggggttatgcttcttcccgcatttatattccttgccataactgcggccataggattggggatgtttcttctggttaagtttgtgaaggaaaggaaagggaaatgatttttgccattatttatattgttctcggtatcatcatggcaggggctgtaatttaccacacccttcgtgaacaagatttactgatggtcgaggatattttaatttccctgatctgtggtgttttttggtggttagctattttatgtgccatttgtggttgggtagggaagcatctgaatagtaggacagttgtgtacaggagaaagaaataatgaagacacgtatgtattgcgtagtaaatcaatatattgcaggtatccatgccggaattcagtccgctcatgcgatcgctgaggtattccgtgactacacccctgccaagacaaaggcaggtaagttagtattggaatgggctgatgaagataagactatcattgttcttaatggcggttatcagtcaagccttcaatccctgtgtgaaaagctgatccctgtttcagctacgtacccgtgggcctcgttctgcgaggaaaaggatgctcttaacggggcaatgacggcagttgctgttgtgctaccagagtatatgtacaatccacaatacatggaagttgcggatctcgtataccggccaggtcaactgtcaggaccacaaattgcgaatcagtatcgtgatgagatgggaaatgttatccacaactatacccaagtggagaaagacctgattaccatgatcaaatctttccgactgaaaggagaatagcatgaatgatgttcgtggcgatactcttaaggttggcgactctgtttatatttatttcgggtacaatgaactaaaacccggcattgtaaagcagatccggggtaagctagccaaggtgttggttgatgcataccctaaccggaaagaagacgagagtcgttactctttgtctaagtggaaacctggtatctgcatgatcaaggcggaagagcctactggttattatccagatgaggtgatccttctgcttgaagagatccgccgtctgcgtgacgaagccccgatgaataaagatggtctgccaacaaagcaactgtgtcagggcctcctgaacttttgggatatgaaacgccagatgaaactggtaacctcctaggagagatgatggaaaatttcgaagtgatgcgatgccactcaggaagtttggcttatggcacaaatctgccaactagtgatgtggatatccggggtctgttctgcgcccctcctaaattcattcgcacaccgttctttaacattaaagagcaaacactggaagacgaagaggatggaaagatttatgagctgacaaacttcatgaagttgtttgctgagatgaatcctaacattatcgagctgatgtttgtcgatgatgtggatatcttgcaaacctccgaagtttatgaatatctacgcacaatggctccggctctgctgacaagtaaggtcgcattttccttctctggctatgcgatggcacagcttaagcgtattcgcggtcatgataagtggatcagcaatcctcagccagaggcaaagcctacgcaaaaggagttcttccgcttagttcacaactatagtgagaacgagttccttgctggggcaattaaacatgatcgcttcatggaagcaatgaacaatctcaacgatatgtgtatccttgtaccttatgggaacgatatctatggggtgatggaaaacttcagtagctcagggatgttcaatgctgacggttcaattcgccatgttgactatcagcaactttctgattctgacaagcggagaaaacctgtctttattgtcaaatatttggcagaggaacacaaacaggccaaagagaagcatcgtaactattggacatggaaacagaaccgaaatgaagttcgtcaccagctcgaagttgattttggttatgacacgaaacatgcgatgcaccttgtacggctgatgcgtatggcagaagagattctttctgatgggaaggtcctcgtgaagcgtcctgatgctcaggaactcctcgatatccgggctggtaagtggactcttgacgaactgctctcatgggctgacgagaaggaccattatatccggggagatttgtacaaaaagacacagcttcctaaaatggcggatcttgacctgtttgccagggttctcatgacggctcaagatatgtgttggagtaaactggtatgattgaagcgctggtagggatatttggtgttgcatattcaatcatagccgtggtatactcaatcaggatggaaaaggacacagtcctgaagcaaatctataaggccaagacggatcgggattggtctgaaatttgttttgccatcggttttgcatggcccttcggggccttaatccactatgttatgaggagaagaaatgcgacagcttgagtttatgggtagaatggtagaactgatttcagaatggcaatcagaatataaaatgcacaggaatctctccgaagaacctgagaactggcccgacaccagagatcaggaagattggatggaggatttctttgtttggctacaatgtaaggggtatacagtatgagttatggtcttctcactccagaacaggcaaagattatgagagaaagatactatgcccagcaaggcatcgagaaagttgtatggccttcttcaggtgataccggaactgtgaagtgcttgcatgactcttgtccgaattgtggtggcactggtgttagaaaagatggcacgggtttatgcttccacggtatctcttgtccttgtcccaagtgcagttttaagtgctgaatcgtccctatcttatatgataaccctgtttttcatgataaaatggatctatcattaagataggaggttagtatgtttcaaaagattgtacgtgaacaccctatccttcgagagcactggcatactctgctggaaaagggttttatagaaaactcaaaaggttgcatcgctctcgtaagggagcctgtgacagaagaacgagttctcgtcataagggatgccaaaaacggcatccttttttctatcaaagttggtcgtctggacgtcactaggggttcaaataccataagaccaacaacttacacttttcgtgttggagacatggggaagctcgatccagaacatctggaagaggcctttgatagttatgaagggttcgaagcctctattcgtgatctctatagatcgttggataggattatcagtgaatacaagaaaacgctaggtgtaaaataccgagtaaaagactggttcagaaattccaataaccgctggtttctcctggcggcagttctctacggcctgttgacggtatttctgaccttgcactaagaggagattattatgagagatcgtcaggagtattatcgtcagtatgccgcccgtcgtcgtgagattgatcgtcagcggcgttccacaccggaaggtaaagcagaacaacttcgtattcgtcttgctcgtattgaagcagagaaacgtgctaccctccatagtgagtgggatgagtttgtcagagatgaggctgaccacttgtgttctgttcgctgtgaagatactggaataaagtgggaaccagaccacatgcttccgctcagggcaactaaagtgtccggccttaactgtggtgataatatccaggtgatacctgcgaccctcaacaggaagaagaaaaaccgtatgatctataccgaaaggaatgaatggttgaaagatgtatagaagaaacccggcaatcgccgggttttttattgacctttggatagcttttctatcacgagatgatctgaatcgtccaggtgcatcaagtgatcagatcggatatcatgcagatatgggagtccatcaacgtgacaaagaaaccaggattcgttacgagggtaatatccatttacaccgaggatggtcttctccagcacaagacagcgttttccattaaggatattatcctccgagaatccatacagcaggcagatggaatcaacacaaaccttatggtctggctcgttacgatcaggcatgccactatcttctaattctagcatttttttctccaaagttaagttcgtcatttagcttttgtacacggtgtgggagaatctcctcataccaccaatctttctcgtgaagacgataagacacatagacctctacggtatcctcgtccttgcgtacagtccgggtataaatatcccgaatggttgcctcgtattgaccatctatgaggacgatttcgtaaattttgtacttgtcttgttcgagaatttgttctgacattttatctcctatttgattctttttccaccatgtttttcatagatggagatgactttttctaagtctaacacagaaactgtctctgtccaaccatctttcaactctctctcattaaggacacctgtctttagggtttgtttacattcacgctctgcggtcttacagcgcattaccgaattaaactgccaaacaccaacgttttctacttggaaagtgtttcttttgttttggtgcaacatccttttgagccaatctctagctattcctaattttaatgcacacacgatatctaaatctttgacaaggtggatgtaggcctgattttggagatgtcctgcacacaaagggcaaccggaacccttaagatggttggcaggtaactgctcaaaataaccgtgatgtttgcatcttattgataccatttttgaactgttggtgtaggcggttgagctataatcgtacctctgtccatgaatggtctccgcctgtaaaacgaaatcttctaaggactttctcagactgagagtatactttacctttccgcaactggggcatccattaccattcaggtgtgaactaggagtttgtttgaaggggccatgctctgagcacagtatctccacttttctattgcttttggtgtactttactcttccatagtcatatttctctccatgcttttctattgccttctttatgaaagtatctgtatttcctttgtaacttcctccgcacaaagggcatcccttaccagagaggtgctccttcggcgcttgcatgaaaggaccatgaagggggcaatctatggagacctttaaacggttattcttatagtcaacattcgagtaaccatacttatcaccgtgcttgttttttgccatttctatgaaagttttcgcggttcctctcagcttctcctttcctgaacgagatgagcactctggacatccagacgttctctttttgtttgtataattgtcaatactagtggttgtccattcaccgtgctctgagcagtacaatcttaacttggttttttgccttttatattctccataccaaccattgaacatgtggcctttttcattagctgtcaacgtcactctttctttccattgctcttctgttagtttcactctgcccccttttcagaacttatgcaggaagtatataaaaaagatttatgaaatgcaatccttgacacgacctctttttctgtcataatgccaagataaacaatttcaaaggagaaatcatggggaggcttatgaaaaaattctgcatctatgggcgagtgagcgttgacaacggctggtatttgtgcaaatctggtatcagtgaagaagaacttgccaagtggctggcctattaccgtaaaacttggcgttatgttaagggtgtctcttatgattgagttttttagaagtctttatttcaagctgtttagaaacaggcagttgtctttgtatgcgacatcaaaatggtcagtgacttgggcagacatcggggttaaggaaacaggtcaatggatgtattttgtatctccgagaggaaaaagatacgtagagccaaccaacgtgccgtgccttttatcgaggtctgatctacctgggtatgctgcctgtacgatctggagaaacggcggtccattgccggacagtgctcggagggtgaaagatgaataaatttaggctaaaatgtcaaggtggccgttggtgggtgcaggaaaaattctttgggttcctgtggctaaccatttggaatccctctttgacgaaagaaagtgcaatggcaaagattgcagagcacgtccaggaaaaagaggatgagtgcatttactatcccacacgggaagagattatcgccgcagtctctgctaagatgttgcgaccaggtccaccaccagcccctccttccaagccttaatgaggataaaatatgatttacgatgatttggttttgataaagtctgctctgaagaaatctcggagcaatggaatttacttcagggaccctaagtggttacagggcatttacatttacatgtctaagggaggcagtttatatcttgtttacaatttagacaaaatgtgcctgctggaaggatttcgttgttgtccgattcatgagcatgatctcctcaggcttggtggtgaatcttttgagatctgggatggtgctttatgattgagatctggaaaaccttgggctgtgttatcatgaccattatcatggggaccggcttggtgctgacaacagaatttcgcgagttcttggggatgttgttgtttggaatagcattcgcattctgggctaaccttttcctggatcgtttttggcggctattagaaaatcattaggagactaaatgggaagcacttttactgtccaatactggacaaacgcctacgaaggtgagtataaatattatgtattctggcagggcgaaagctttgacgaggccattcggcagatggtaaaatgtaaggacaaaggctacggttgcgtaaagatggagtggcggtgaatgaagatagaaagcaaaaatatggctatgggaacgcagtctttacagcagatggcaagagattaccaatggtgggacccgagtgggacccctaatgggagatcgctctcaaacgaggaggttatctttctgaaagccatcaagaagtacaccaaatggcctttgacgaaagtagccgaaatgatggggatctcataccacaaggttataaaggccgtccgattaagagaccctgtgctggttccttcaagaatcccggaatacttttatgaggtcacggggatggtgaagggtaaaaatggtcccgaaggtactgctaagaacatcaaggctggaaatcaagcactcagtgacgaggatgtcgcggtcataagggaactgcacaagagaggatatgctgtggaagacatcgccacagcctttaataaaagtatcggctacaccggaacacttatcagaggtgatagtcggcacttcttggccgcagaccctgaacgggtgaaagaaagaatggctagctttgaaaaactgtttggggatcgtgtataggcgcgaagcgccgcgccgtccaaatccagtacccccccgctacgccggggcctggattttgccgtcgatctttttgtgaaggagttttcgtggaaaatgttaagaaggcattagagcatcttgatacaacgcgccccggtatccggtgggtggagggtgtttctcatgggtatcagggcgcacttgcatatgtagaaaatattcgtgcagcggcagaggcttgttggtacattcaggacatggctgattggacaaagcgctttgctttgaaagaaaagacgaaagctattgttggtcatgatcgtattctttttggaaaagagccttgacacctcacggatagtaatatatcctcagggtatctaatcaagaggaggagctatgaatttctggataatgcgagcgatcgtccgcgatcacttcaatgcggaaagaagcggtgtttatgagaacctcggatgtctgccttttatcctgaaagtcgtagccattgttctcatcatcgcggtacttaatcactttggtctttgggagtaatgatatgtttgtcttagtatttacgtttttcctgttcattttgaacacggtttgctgtgggttgcagggattaacactcctgcttcgtaaaaaagaagatccgtttgttttccctggtctcatgatgattacccatgcatttctttcagcatggatgttcaatgtttggtgggagatgacaccatgaatatctttacggatgcaaggatggggaccccaataacacctgaagagcgtgagtggataaagcaagaaattgctaccgcagaggcgcagttaaccgacgaagcgtggatagagaactacgtgaagggctgtcatgaagatggcatgacctctttcgatcgcgagctagttattatgtgtattgaggctgacctttatggtatgaaaaggtgcctgaagtacaattacgttcttctttggtaggagaaagatatgttttttactatttttgcgttgttgctgaatttctttgttggtgtataccaaagtaagaaggctttgttggagggtaacaagtgttcagcagtgcttgctgtatttaactggttctttgttggaacactttcgttaatccttcttagggaggtcattgcatgacaatggaagaatatctgaaagaactctccaatgagaaactaatggagtatgccgagacggcagagagttacctggtagaacacccggaacctgagataatcaaaggtcgtagccatgtccgtaagtgggccagctttgctcgtgaagagctggcacgtcgtaaactggagggaagcaatgaagctaactgacgacccaatccccgcactagagggcatggttggggacataaccatctgtgcgacaggtgcaaaatacccgcgtcttcgcgggataactttgactcaaccactacacgcaaacggtgatgatgacgataccatcatgatcgaacttgatgaccttgatgagttcatcgagaaactacaggaagtcagaaaattttacaccgaaaacccgaaggttatgaaatgaataccctcaacacctatacaaaagtgttctacctttggtggcaaaatctgaaccgttctgtttacggcacaaaagatgaggcgcttaaaggctggatagactgtatgcttaagaagcacgaaatcaatgacaaggggagtatcctccggggaacagatgcgtactgcctgggatggaacgctgctgtcgagtttattcttggggagaattactatggcctacaggacatttgaggaatggaatgcccgtgggaggatcgtcaaaaagggcgagaaagctatgggccaccttcttgacggaactgcgcttttcggaaaggaacagaccaaagggaaaaagagtagagactggggcgagactgctttagacgatggcccggactcgtggtatatgggtgatgaaggggaatattattgatgacagcactattggcaatactctggtttctttggttattcatctctgtcacagccgttttcgaatgtgttggctggaggagtatggtgcaattcttccccgaaggtcggcggtggtggatgctgccacttcagttgctgacactctttaacttcgctgtatgtattctacagaatccatttgcggggtgataatgaaagctatcccgctgaagaagtgcaaacctgtaacctactgcaaattctgcaaagccattggcatccgcaggcgctgcacagttatgacgaaataccaaccaccgtggggactgcgtgactggtacaagcattacgcctgtgatgaacacaaacacctgattgaagaccccgacccacggggaatcatggaagctgctgcaaagaaccctgctccaccacaaaaggttgcacgggatgagcaccacacagaagctgactatcaaacctggatgagactgtaggagacagaatgtataaaacaccaaaattgaaaaaacttaaacactttccgtggatcgaagatattgacggactcaaggcctactgcaagaagatagcagaggggtctgagaacgcgcaaagagagggttgcgaggtctttattctaccaggtaatttgcacgatatctgtatcaaatacaccggaggagatgtatttcatttagcagagattatggctacatggttcaaagagcataagcatgaagcagtgatcattttgaaacaatacagggacacaacatcccccagcttttggacaacaatcttaaatgtatacaggtctcctgccagtgtagctatggacctttgggaaggctatgttcgtgaagaagaaggagaggccgtcaggattttggatatgtacgacaccagtaaggaagaatggatcacaaaagaggcgtacagcagaactggggttatgaaaattcgaggtggtttcaccacacaacaagcacacaataagggagcctgaagaggctccttttcttttatctaaagtggcgcatcaattttctcttgacgtaaactgtcgagtcgattatactggccccacataatcaaacaggagatatgtatggaagtaacggtcaagagaggaaaagggaggcccaccaaaagtgagcaggtcagaatacaagaaacgagggcatctttcctcataaaggagttgttgccagatatagttaaggatttatttacaataggccaagatagcactgttgatccatctgtgcgtgtgtcggctttgacagcccttctgaactacactggcaaagaaggtggtggcgaggatgttttattgccgggagtacttggattatctacaacactgaaaacaaatccaaagacatgggtatatttgcaaaaattggagtctgaggaaagggtagtatacaaatttgggataagtagtaagccagagcaaagattaaagcaacaatctaggaagagtgttttcacacacaaactattatccgccgtggggccattctcttattcggaggccaggaaaatagagaaggagatagcaggagccatatctgagacacctctctcccagaatgatttgcctgacggatggacagagaccttttcagaaaaggatttaccacaagtcaacaagatatttaataaatacttgtgagttttgagggttgacctaaagcgtcagccctgttatgctttatgtaagccacatctcctgaagctggaggatacaatcaccaagggtgcgccgcacctgagaattgaataattctcattcaacaatctcaaccgggcgttggatgcccggattgttgaactgtaccaccacccctgcgtgaaagattgtacatcctgttaacacacaacctgaagggacttaccgatatgtcgataaaacaccctttcataaacacattgccgtaacgtgtcgatgccataagcatgtctgaagtggcctccgttttctccacataaccacccccgcccccgtggggaaatcaaaacatgcccctgccgaaaatatcacttgccgaaaaatatctgtctgggtgttttggagcattcgtactgtctgaggtgctagacggacagctccgggcgtcaactatttttacggatctttacaaaatatcatgggcaaggtcgatccggtccccggtccctcggggcctcttcaggcatgatagttacttgccgaaactaataattatcaaatgtgacagatagcaagcatatggtttgccagcttatagcactatttatcattgacaagcttatatttatatgaattacgccatttaacataaaacacgttatacgcaccagctaacaatacatagcaagctaataatgccgcaatgttaccagtgtgacgcataggccagttgcttcaggtcattgcatggtgttactgttactgtggtgatagtttcacgtgtgattattcatgttttagggttgttttgtgaatgagacgacgaatgagaatcattattatttcgatttcgaattcaatttcgaaatgagaatcattccgcaaatataaatattttgtaaatttataaataaaagcttgacaaggagagagaattgtgtttaacacacagctatactttgagcatttccgcaatgataatcattcccatcaacaccgttacggaccggatacccggcaatgctaaagcattgaaatagttacaataagtaactattttctttattgctacgcaagggattgatagatattttcgataataaaaacacttgacagtttacacttcttccatgctcaaaatcaggcctttccataggccataggcccacattagcaagttatttattgctatttgtcaatcattaaatttcatttaatcacataataataacgggttgttaccatcaccagcgacacaataacacgagggcgatcaacgatagttgatcggtgttatcgtggcgatgtgataaagttccattgctaatcattacggatgtaatgataatacactgtaataatttcgtccttgatcgtagcgtctacgagccacgataacgcgaacgagaatgcgatttgttcgcatttgagttaccctcgtgttattgtgtcgctcgctacgctcgcgccactccccacgattacgcgaacgatttttatttgacaagattttatttttatgctcaataaaaccagttcacacaataggttagatgataaaagttatcatttgagagtgattctcacagtatgcatacataatgcttaaaaatgcatgttttattcagttaataacatgcgttattaattgttggggttgttaggtagggccataccattttaagcgcaatatgcgccattctgaggggctttatctcttgccctggttagtgggttgccgcctggagatctcgattatgcaggttttagtcacctatcactttttgattattgattgataaaacctaacatataaaaacacaaaagccgggagttgcccggcattatttttggggagtagtggagccttacagcgcgatagccagcaggccagcgatcaagaaagggagatcataacggtctaaacgattaaagcgattaagtttaatcagggtgtaaaacgtcaattgtaaaacgtctatgatggtgttaaatccttgcgccgttgtttccgtcgttaccagacaggccagccagttaaaacacgtattagacactaaagcaataaggcaagccagcagggtagcgcgtaaaaggcttgttttgcttacagtgtaaatcatgtttgtcatttggtgttactcgtttaatgaaggagatagaagaataacagacgaaaaagggcgctgcaatagcgccccgatgtttaagctaattcaatctcaaataaaacgcccatatagcgatcatcacctgaaagcgtagtaacaattttcatacattcttcaaaggtccaagccattgtagacccctggcgaacataagacacataaccggtttttgaagtgcttttgatattgtagcggatatttgacattttatttaccttcggttttgcgggttggttatcttcccgccctgaaataaataatagtcgaaaacatctggctagacaagcgttttgccttttctttacagcctcattcactgattagtttaaattccgcctcagggtgataaaggtcggccatatagcgctttttgtaatagaaagatacttccacaatgtggggcgcttcgatttctatttgtgtgatagtcactaaaccaggtttaaagcctggtgcaatgtccggtaactcaatgaccattccgccttttaaatcttttgcttttacagttttcataatcattagccttttttgcgtttcattactttgattactttaaggcccttttgttctaaaaaatcagggcggcgcaattgtgcggcactgctacggcttttcaccttgttagacaacacgccataatagcgcccgtcctcatactgcccgatgaaataacagtcatttacgccgtatttttcatcgcctgctttctggatgatttcggctaatttgtcaacactaatattaatcataattgctttacctcaaaggatagcggggcggctagcgccccgattagattatttggttttgtattcagcgatccagcgggtgaagatttccgcttgcttttccgctgcttcggcggtgcggtgctgcattacttcaacatgccaacaatcagccaaagtaaaacctgatgcatgagcggtccagggatatgacggatctttttcttgatatgctttcagcattgccggatcttcatggaaaacgtagggtttaagctggctagcgttgtatgaatcaccaccgtttccaagtttggcccactcgttatggcttgatagatatttatccagcatttcaaagaatttagatttagtcatttccgtttacctcgctttgtttggtgagtctgtattatggggcctttcggccccgttgtcaattagtttaaatcaagattcattgccaggtcaaccagggcggcgatctgctgttcgttagcgatgcggcctacaacgtggcggatataaacacggatcaataattctttattggttgcaaaacaaggatgagcgcggagatcttttttacgaaatttgtcttcggttgcgagggtcataacgccatttttaaactcaatagacatttgcaaaccatcggtaaaagtagccatgaaataattttcaaaagcaacggtttcaacgtgtaaacgtgcgccttctttgtgctcctgcatacatacagtgccataataaccgaaagcgctggcttgttcgtcgcggatgtagtaacggtcaaagttagttaagcgcatgatgtttacctcgttaagttgttttcgtttgtttgccctacgagataaataataatataagcggggatcgctgtcaatagctctttacgtatctttacattattcagtttttgcatctttatgcatcgctatgcaattgatttcatggtgaaattactttttagccgtttttacgtgtcaagctatttttatatagccttaaaacgtcctgaatcgcgttctaagcggtttttcgtccaggccgtaccctagcccattttatcagagatctcgccatattcactattttgcataggattttaggcgttgttgagagtaattctcattaccggaataacgggcacctccggtggctttcctccggtgtccatcgttgccgcttcaaccaaagaatagcaaaaaccaggaccgaaagcaagccctggaattgtaaagattttgcatatcatgccaggccggatctcttcgcctttgcaatgtcagaatataatttcctgaagtatgccgggcctcgctcgtttactctcacatactcatcacgcgccgccccctggagatcagcgggcaataaaccatgatagtcaccgttaacaatggcgatccgctttttgttgccatcataatagacgtatgacccatcggcaaggtaaattgtgcagttctgccggatgtagggtatcaaatacgcctcgccctggtgccggattttgtaaagcgccatttgcccattgtagatccggcggacgtgatacgggtcattgattgcccggtgaatgttttccttccaggcctggcgagcgttgccaacattacggatcagcgcttccacctcggggataacgacgttagcacgggcggcggcttttgcctggtctgataattcatcgtaataaaacattcgtacactaatcattttttaatccccatgaaaggaaagcaagccagatcggcggggcgcaagtggtctacacgtcgccagccttttggcgtttcaactaaaacgcggttttcaatccagcggtaaattttaccagatcgcatattgagaaaacgtatcatttgcatttaccagtaaaagttgccccggcgatccggggcctggtgtacattatgccacaagggcgggacggtttacaacggttgttttaacgtcttgatagatatcatgttttttaacggtggctttaaacttaacaaccgcgccaaccgggccgaactcttttgatccgatgtatgttaccaggtcatcaccctggcggactttgataatatagtatgatgattgattccattcatcaattttgagataggagaaaacgatctcaccctcaaaaaccaggcgatcgccaatgttgccgatccagttgctttttaaatcctcggctttacgctcggcgcgtttttggtcacgggctgcaatgtaaccatgatcaagagcataacccaaacatgccgcgcttaatgcttccattaccgggccgttgtctggcttgttagccatatcagcaaaaaataaaacataggattctgtaacatcggcaaacgttttaccgcaatgcttgccaaaaggaaagcgccccgcttcgatttcttcgatccgggcagtatcaacgatcgacaatttaccgcgacgttgccccagctcaaaatctgcgtagcctgcaaaaacttgctcaaagttttctgtattggcgatccgggcggttactcgatcgaaatattcctttgctttattttctgctttttggggatcggttgaaagattgcaaatgtaagaatctgcaaaaacgccgccaccacagttacggcggcgcaatgtatacattgcattcagcttgccggagtcgatgtaataagtaacggtgattttagtagtcattctgtttacctcgatttgtgggccgtcgcatcattgccgccctacacattaagcataataaaagtcgctcacgtttgcaagcgactttttagattaattttctcaatcagttagcacgaaaaacatcgttaacaatagcagttgtaaacatccagaccagatccggggtagttatcggcaggctgtcagcctgttttattgttactccgcttctttcaagcgtgtaggcgataaaatgacggttctcaagtttcccgctatgggattgaatagatctttcagtacggatcaggacagttaaacggtccgtttgttcgctgtcattctcatggcaaaatactaacatggttttttcaccctggcgattaaagtcacaattgacattatcgttaacattttccagaaagaaaaatttgtttgccttttccatactattttacctttttgttagtgtgtcaatcttgcccggtccaagtaatatacccgaaccgggccaggggatcaataattattttcgctttccggcatcggttcgacttccggcgatggtatgcaggccggattaatccagcgcccctggcgctgatagtcgacggcgacgatctcgcaagtcaattgatcatcatagctttctactacataatcatcacactgttttaaggccagcgcaccataaaagcacatacccgcgaatacttcaaacatgatcgttaccttactttttgagggtgagaatagggcgcttatcgccttctttaacgccggggtctaactcatcgcagatcccgatctgctcgcctttgcccaacgtgtattcgttttcgtagacgttgcaagcctgctccgtggggaatgtttttttaacattccaatcacattgtaatgccatcgaactaacagaaatatgacaagccaatataataaatccaaacatggtagccgccttaattgggcgcaaggccccgctattgattatttgttgatctgatttgtctgattatagatcccatattgaacacgggacacggtaacagattgagggagtaagcaacgaacacgatccgcgcggttgtcatattttttgatatgcgccggagtattgttgcgggtaaacttcacgcgtaaacgtaatttattgggatcgcgatcatcgattccggttaccacgccaaaagcgatttgaccatagttatgatacaccattttacccaggaattttgattcaagatcggcgatgttagattttacgttttgcatgttgtttacctttttcagtgtggcggtgaattccgccactgattaaaggatagcataacgccgccaggatgcaacaaatatttttaagaattgttgagaactgttctcatatgcagtgatgtgcatagaaaatcgctgttatgcaattagtttcaaccgataactaaatttgcggcgtttttagcggggcgcggttatcggataccctctaaaacgccctcaaatcgattctaagcgcttcaatgtgtaaccctggtaagtgcattgctacgctgagatctcgccatattcactattttgcataaaaaagccggggaattatccccggcctggttattcacctgctacggcgtatcgctgcaaattacgtttacgatccgcaaggcgtttatttaacctcggatcatactggtccggcgaccattgaaccgcgatccgttccggcttatgccgtttattgttacgctcgcgccgctcgttagtctcaccaaaagcaaggcgatcgcgctggcttgtcatcttctcaaagttgcggctttttgctgtcatatcttgatcccctgtggttgtatgtttccgctcgccattctgcgatctgttttttgcgatattcgatcagctcttcgatgtagtcgaaggatccctctttatgtaccaggaccacgccgccccggtgtttaatctcacatatcaggccgctaccctccagatcattcaacggcccggatcgcctggtgtggtactcctccccctggaagcgatattctatatagtggaacattgttttaaccctgtaccagtagtaaaaccattttataacacgccaggatctggcgtggatttttgcataataacaaaatatgagtagaatcaacaattctttcatattacgcggcgctgtttttaaatggcttatcccacgatccgaactgtagatcgatatagtgacctacattaaaatagtctgtcatgatgtcgcttctatcataattgtcagtgtttagcgcgttgatgattttttcaagcgttgcggtaaactctttatcactcgaataagtatgagcatgataatggttaatgccgagatatgtaaagccgtccgggtatccttctttaactgatttatgatccattttagacacaagatcaaacggcgcggatcggatagtgcaaacaatagttgaatagtgacggatcgcaaatgttgctttccaacctttgggcaatacagcttttaccgcttcgacaattttcgctttcttctctttattcatgtaggccattttgtttaccttttaggttatgccggggacaattccccggctttaatcagtatagcggtttaaagaatctttgcaacgtctttataagaccatgcaaaaagggaattttgtttacctggtgcaccttccgccagacgtccagcaaatcgggcgcggttatgggggaactcaaagactaccacgcgaccggatatcatttccacgcggtcaccgtttttaagaagtttgatccggtcaattagtgctttatgctcttttttgtgtttagtatgttgacgacaagcggcgcgccaattaacggaaaattcatctttttgcgtggatcgcttaaggaatttttcaggacagttataataacacgggccgcaagattcatccatgtctttataaaaaaccataccatctttacgggaaagaattgtaacacgaatgtaaagactttcatccctcgcccttgcaagttgataaacttcattgcctacaatagaagtttcgatcacgcggttatcagtcagataattttcaacaaattttttgttattaagattagaataaatgccagtccagcccatgatattttacctcgtttagtgtttagtttgttggtgcctggtaattataggccctttccgggcctggtgtcaaatgatacgttcgaatttatcaaatctttttgcggatctgccgtgaacgtcgatcacgacgttggcgcgtttaccatcgcacaaaccacaatctaaacagctaatattgtgagtagtattaacgcaagtgatctcaccttccaagcggcgcatgttgggagttttcacgcgaaaagttttataacccttgcgccatgctgtgatcgcttgtttttccgtatcggcggagatctggcaaatggtagcgatacgatgatcaaaattcttatggtggacctggtgagtgtatcccgtgttaccttgcgtatggttgatcatgttttgccatacctcaaaaggaaccgccgccggatcaccgtaggaacctaaacgaatatgacgacccgcaaaatgtaccagatcgcgagaatcaagatctttatagttgccttttttgtaagacttccagactgacagcggggcctggtgtagcgttacataacaagcgccgtttaagctggtacgatggggacacataccgcaaacagatgaatcaagttttttagcgctcgcttccagtgggctaacatcttcccgcatgatccaggtctggatcatatcgccggttttatcgttagcggttgacattgtagcaatgaccacgatcggggccttatccagaactgacgggcctttatataatacataacccttttttgctgtggattttttacccggtacactatgcacgatctcggattctgagttgacaaccagaccattattaagtttaaacgtagacattgctttttacctcgatttatcgcggcccttgccgcctgagaaaacactttatcaaaggcgctaactgaaagcaagcgcctaggataaaatattttatttagccagggataaggtttttccgtggttgatcccagggataacccattgccccgcgtcatctttaacaggttgacgtaaacgcgccgccgtggttaccttgctgttaacattacgggcaaaagcgcgggcctggtcacgggtagtaaaagaaatgtttttcatgttgtaacctcgttttgtgtggtttttgtttcgcttgtcaggtccggggattataaccccggacactagctagtgtcaattaaatgtttattcttcgccaggttcaccataggcgctagaaataggcgcgccacaatgggcgcatggagtatctgacccttcccaatagatatccactccagcaggcatccaggcccggtcgttttcgtctcgcaatccctccaaaatttggcggaaattttcacgggcacaatttgaacaaatgatctcactatcccgcatgatcaaaattttcggatacccaccgaactcatacgggtggcggatataattttttacagtgccgatcaattgtttgttagcggaaattttcattctgttttaccttttaagttgggcggcgaggcgacctgatgagatgaatagtaagcgctttactaattgccgtcaatcccctggatgaaaataaattaaaaatatttttgttcgtgtgggcttgcgccccggcgtggttagtgtactatataaggacgcccacaaataaaggtaaacgaaatggaaaacgcaaaagtgataacgagtgaaacaatggttaccctttccacctgggagacggaaagcgcagcgccccaggttaggatcgtgcctttaccgtttgcagaacgtgccagcctatccggcttttactatggcacaaaggcggttagtgagtccggcgcggtgttatgggatagccgggaggattgaaaaatattttatcgcggggcttgcaaacggccccggcctgggttatatttatcagacaggagaagagacgccaccccacggcgaaaaggcggggctaacataccaggcgcggagacctggttggaaggtggatcgccggtagctcgcctaaagtctatttgtaaagaattgtaaagacgcttgcaacatggggccgtgtatcctatattatacacatagcgggaacattgaaaccggagtacaaaacaccgggggtgcctgtcattcagcaaatgagaatgattatcattcaaataactaaataagaatgcttctcattcaacaaaaaatttaaatattgacttctgatttttcatgtgagatactgagcgatacccctaaaaaattttttcgcgtaagaaaacaaatacgatctggaaattgagatctcgatcgagaaccgggccgaaaaattttttctagagaaaaaacaattacgatctcgattttgaaaaaccgatcgagaacccggttgatagcgagaaaaattttttaatagtgagatcgaatacgtttttgaaaacgaaaagtcgatcgagaacccagagttttctacctgaaaatttgagatatctttttcgcctatttgagataaatgtccaatcttgatgccaagatacctatagcaatcatacacttgtgcataatttttctacatagatcccacaaaggtttgagataatctactcccaaaactcttgatttaaaaatttgcagggaagatgaaatccatttcaaaaactattttgaaaaccatttcgaattttaaaatatctttgggatattaaatatcatacaaatatcacacagttttgaatcttatctcggactgaaaatcactttccattttaaaatatcataggttgtacctgtagatatttcatacatttgaatttcttctggagtcggattacaaatgtcaatgaaaaatgtgctcaatacagaaatcaggaaccgttctgtctttcctgggactgtgtaaacaatacgcatatcaccgggaataggagaaaggaccaaagaagtagggccattcataagtgtaacggtattatcagcaatcttgatacgaccatcgacaccatacaccaaatcatggacagaagaataatgtgcaagcacctctactaccgggttaccgacaaggttcacgaggtaaccaagatacaggtctcgccatccacgattctgcatcatgtaccgtatatgggagcctccatcaaacatctcgcccagttgctctgcaatccaggcaacaccatttgcaatgtcttctctgttccaggtgttgtcgatatctaaaatatccttgctgaacttgttcaggcggcgcatagcattgagtacatactcacctctttcaacgaaggcacgttcagtgtcttttgcataatcgagaagcccttcaacctctgagcctgtggcgtattgcttaaggtcatcaagcacactttccacgctggccttggcctgattgaaagtccactcatcagcctcgtcagtagagaattctacaccaccaagggcgtatgtagcatcatcatagagttttttgagatcatgacgcatatccgggaagtcataaccaaccttgttatgagggataagttcaagagtgtttaaaatagtggtcattgtatatcgtcctgtaatcaatcctgaggcgttttatgcaaaggcagtacgtttgcctaccttgtatactaaaaaccccgccacggcgtttctacgcatcatacggggtatcatagcatctgtttttcagtcacgtttcatttggtagcgcatatacgccatattcatcttgtgttttacgtcgtaagtaaccggaagattaccaaatacaaagtagcagacatcatacatgatctcccagaacttaaaaaccaaatatttagaccgtttttctaagctcatcatctcacctccacaggttcaataaaatagttctgaccttgttttgtttgacaaaatgaaccaacgtaccagacaccggaaccaccatgatgggtgctacggaggatatcatatccgcgaagcttttccgctttttggacattttctggtgcatcgactatcttcatcagcaaatcaaaaccagacatcgacatcaggaacttgttcccaccttgatcgaccatttcgatattagcagcagaacgaccacgactgaatccagtgtactgaagtttcagctcgcgaatttcatgacgatcggaaacatccaccttatcttccatcttccagtcatgggcatacccggtataccaagcattactgcctttgaggtatagtgcggggtatccacgctttcctaacttagccatatctcacctcctgctgggcggctgcgagcatggtggcgcggcaggattcatacttcgccatcacgaccaaaacgccatgattccatgcgtgctcatcaattgagtcgcacgttttacattcttcaatcgccgcttcgaatatcgacacatcatccggcactaccggagagttgccagcctcataagctacgcgcatccagtgataaaaagcttctgcggtaacacagccgcaatctacttcaataaccccatcttgttgcgataaccattcttcgaatttcatggcttaccctcgttcttttcaataccaaggatcataccctggagttgttgtttcattggaatcaggattggcatatcatcaatccagacatctggtgtccagccgttttctgcacacacttgggccttttgtacaccaccacagtagattactttgatatccagctcattagcccagaactcaatgtccgagttattatcagtcggatatcggaaggtaacgaaacgaacatcaaagtcaccttcgataatcattaaatcaacaatgtgatgccacatggtgggatttaacgtgaaagtatcatcgaagtcaagtgctattttctttttctcgaatggtttcacttttcccccggatctgcattttcaccgcgatcccacttatcgcacttcttgtctacaaagtattcaaggcgtctttgggctaatgccgcgcggtccatacgatcttcttggtctgggtctactgcatcttccatttccagcataaatgcaaggtcaatagcgcagtttataacatccgcaatttcacagatggctggttcatcacaacgccaagggcgatttaatgctcgcgatagttcaccaacttcctctacaagattcttgaacaccgaatcaatagtccgggcttcagcccgaaccgaggactggaggacgcgttcagcgattcctgtcatttagactcctttttgtcttcttttgttttggcggctgcatccaactcttcagtatatttcttgatttgagcatcaagatacttaatggtgctatcagccagttgttgtgtacgtggtgactcgaccacattctgacctacatacgccgcaagcattttatatgctgtttctttctgtggcataaagttagcgtacaggatacctaggaaacatacaaccatgccaaagactgcgatcttacgtggacctttggtaacatcctttaccacaacaggtgttgttgattggctctccttccgggttactttataaattgtggactgcttaatatagttgctggagagctttccatcaggcaagcgaactcgaagtgtattatcactgttccataccgtaacgatctcaatcgtacccccggccttatatccactccagtcttggttgagaatcaggttttcaccttcgaagaactgataccctaaggctgtaccattcttctcaaggtcttcataaatcttctgaccgaaatagcaggcggcgtatgcgagagcagagataagcatcagagcaacccaaccaccataattaccgtctgtagtcagaacatcaatcacataaatcagaaaaggccatgaacccattttgtaatctcctcttaagataactttagttaagtgttaaatttccaacagtttcgatgaagccgaagggcatggaaaataccttcaccatataaatcttgtccttaccatcttcatagtaaggcacaactacaacatcatcagctcccagaggaagcatagtcataatcataccagaatctacaacgtattcaagcacagcttctttggtggcaggaatttctttctctgtttgtttgctttccaacaggccaccacggtgttgacgaatacggattgttttcatttattttctctccagcgttgcgggtttttcttcattgaatgcttggcggatgcccatatcgtatccaacacggagaatctctctttcgatcaggaactctatatcgtgttttaacttatcatataccgcatcaggaagtctttcaacaacccagcttgcaccttgagagagagtaagttttgccattttcttgtcggctcgcgccgcccccagttaatcgtcgcatttagaagctcctgtcgcccgtggctccgaacacattgcacttccacacacatctaacacccgtaaacgggttagcttatggctaatccacttatggatgactgaagtgatgaatcacttcctcttgaaactaactatacactaactaaaccatagatcaagatctttttataaagatctatgttttaggttttattatctttattgttttattctttattatgtcgtaggtcatccatgtccggggtgtccggtcaccagtgtccggggttggttacttaatagccacctcatctttggtgatatacaggctggtttttcctggtcggttgactacctctaggtatcccaactcttctaatttctccatagaccgacgaacagtcctttcagaaacaccaacctcttcagagatagtggtggttgattcacaaaactctgagcctttgctgtgaaagaactgccacctgaatttcaagtacaggtaaatgcggatatccgttgaagataacttcagattggatatcatcccataagagcataaaacactgaaactcttagagattctcatgtttctacctccagataattattcaagtgatttttaacaacctcttgggcatactcttgagatgcatcgttgtagtgaagaacagccagatcacatccaagtttgtgcaaacttctctcgaatggagacaagtgtgtcatcataacttcgaccagacttagctcttcttctgtgatatggaggggatcatccgtgaaatccctggaaatgataatctccctctccccaccttctccggcaccatagacctcgacaatcttcctgttacagaaaatttcgtactgatagcttttaccttcttgggcttcaaagttcacaattagacaacaaccaagccccaacaagaggacctggaaatccaaattgtgaacaacttttttatttaaagtgctcatctaaatccaccgtctttccgaatggaggaatccaacccttacgaccaccgcagataacccagagagtgttgtacttacgtccccagcttgagccacgatgtctcaggtcctcgatgtaaccatctgtgaagattataacctcttttgccttaggaataaactcatcgatgtactcaaaagcacatgccgcagtcgttccaccagtcgatgtaactctgtaatccagaatttcctttatgttgtcctgtgtgtacacgttgacgttgccaacttgggttgaccaacagaacaatgtgatacggaaacattggtacagggtgctcaaagcgatgatctcattaaagatacgtgtcattgtttgacgagagatagaacctgaaacgtcaaaaccgattacgatatctacagtttctgttcgttttctacccggcataaccatgaactgtttcttagttaaagcaccgtgatcacgaagaacttttgtcatcccgccggaccgacgacctaaaacccgataagtacgatcagatttaacacgagaaatcatccgttgcttaattatttgcaggtaattaatcttcggtttacctttttgtgcgattaattctctggcttctttcggtccttcaccgccagcggctttcatagcggcgtcaatcatgtcctcagaccaagacatatcctcatcttcctgatcaggagacttctgtgggtgtgggtctgtataccccagaatatctaggtctttatcataatccccgatgtgcgcccccagcggcttacctttactatccccggcttcaccaggcaaaagagcataaatttcttcagccgttttcccctcgtactgatagtcacaatagcagtaagcaaggaatccaaattcttttgacttatcaaacacttgtctatgagtgaaccatttcaaactctcggctttctggcccaactccttgaccagatcagtgttgatatagtgatcggctgcgatattgaaacgtctacggtcaaatgttttcccacgagacatgtggtcgttggtgacatggcggacctcatgcattagaataaatacaatttccttcatggttttttgacgatagaagacatcaacatattctttatattcatctttttgctgttgtgtcatcatcggatgcttgtcaatacgagcaaagacttttttcttgcgatcaacaggcatacccataatgaactctgggttaaagtataggttgcgatgatcagttgctgcggttggaagccatgcacagtcaactatcagcggcataccgcttaatagcgtcccgtagaatggtcgattagtaagtaaagcgatgcgggcagactgaactttcttcagtgctgaatcttgtagcttggagatcatctccgactcgtctttatacacagttatttccctcagtagattatgttgttggtaaagagatttactgtttctaatccagagacctcttctttatgaatcttcattgctatagttagtatagcatcataaacaacgggattaaaatccaattctttataatacttggttgaatagtcaagaagattatttactttttcctgttgccatgctcggtgagcatctgaaggatttaaaaacctacctagacctttcttcttcccgaggtatgaaatctgggaaacaaataaatcatccatcttggacacgccaagcggtaggccgtttttgtttactttgacgactgtcagtaaagagttcaaagtttttggaatgtatacacacgtaagggggccatatacttttttcgaaaaagataataaatccttgtccaatacataaccttccatcgaacgtggagcattttttacagaccacaacctaaaatttgaaaaagtcttccatgcgttaacaaccgtcacgtctgtgtacactccagtaacccttcccaacatactcttccacgccctatagtgagggcatatccaaacctgcttaccattccgaaactggactacgttgtaatctgcgtcatttataccgataccacaaactaatttcattttcttctccaagaaaaaaggccatcagttacgatggccttattataggttaattcatcaccctttgcaatgcaatttggggtaaaaattcatctattccttcaatcctgaaaccccacgctaattgtgggccaggcgctcccggaaggtgaggaacagcaaacaagacgatcccatcaatagctcctcgaatcgcgttctctgtgaaagtctctaccagatccccgaaactaagacccggcctgaagccagcattcagcattttttgctctggcggggatgctggcctgcccaagatatcttcgtacattaggtgttctcctttatttcaacaacctcaatgccgcctgtattatcgccttggtaggttacttcgacatacttttcacctttattgtatcgtattttgaactctcttttcttcttagatagctcttttgagtatacaacttcggagtagtcaaaatgtccaaggcgatccagtgcgaatcgctcaaggatcttatccatttacaccaccttgttcagcattgctgtaactttaggtaggctaagacccgtctggatcatcagttgagtcatagccgtttccatttttttggagacgatgatgaaattatctttggcaaagccaatgttaagatccagaatcagaatggatttaggctcaccagtaagcttctcccctgtcattgcacaggtgctgcgaatatatttggccttgaactgagcatatgtcacacttactttcataccgacatttgcaaaagtattgcagtaatttgcataggcaagcgcaacagctacatcttctggcagtgcaacactgatagcttctttcggttcagcctccacttccacaggtgcagtggtttcttctgccgcaggcggttgtttgtgttcgtgttcagcaagctctttgtagtcggtgttgtgattcttttctacttctgccatgtgttctttcatgtccatttttgtctcctgttgtgggatatatttagttttcagtttttcgagatggtctttagacatattcagcatcatagcctgcacaatctcacggtctagcggatcaattatagtgatggctgttttcttgtcaaccaaacgatctttcaattcattggctctttgcaagacaacgcatacatttccacgaacataacctttcttatcgtcaatgcgctcaactgtcggatacaatgggtctttttcgccatgtaccgacctcgtgctaaagttcatattggtgtagtcgcacgggccgatgcccaaaagcttttctcccatcatgaaccagtcatcaagggtcaaggagaattctaaaccccttttctttgtgcgttctacctttttatgataccgttcttctagacttttaatctcgctgttggtaaatttctttttaacatcaaacatttctaactccttgggtcttacccgttcttagtaaggtgattatcaccattcggaaaagagttgtcaacccttgatttctaaaaagtggcggtgtatctttgttcattatttgttagcgaggcaggtgtgattatgaacaaaatcgatgtgaatgtaaaaactggtgagttttgggaagtgaatcaccaagacagaagcttcatagatatgttgttggaagaaagaaaacttctcttggcccaggagagattcaattcaacctttgaaagggatagatatgttgaaaaccccaccatcagatttagagactatcttcaaggagtgagtgaccagaacccattattggaaataatcttgtcgtgcctcaataagcttccggtgcgaggaggcccctttcactgggagtggtgtgctgataacgatgaagatgtgatggatttcgcttacgatatgaatgggaaaaccatctctcactttctatcccgtatggaggtagagcatagaacacatcgtacaggtggaaaccacccctggtcagatcgtttaacagagacagtggaactttattttcgtgggcatgagtgtggtgaggcgtttaaatgtagattctgggatttttcccgccgtacccgtgactttctttatcatttgaagcctcttcttgaagatatgtcgaacggtgaagatcttcgtttgatcgtggaataccaaagccctcaaaggaataaaggttcttggttagcatctccagaccaccgctttgaccttctacatgtaaggctggtttgcggtgaccttgttcttcacactgattatttaaattcttcagggttggatcagttgtgtagacaagtaaatcattcgattatcaacatcatgaacaggaaggttggaaacaaagctcgtaaagccatgttcgtttgctctcctgtcgaaactatgtttcatttagagtatgatcccaaactacagagcatgatggagggggaaaccccgactgaagaagaactcatgatgatgtctattgctggatatgaagatgaattttggcttgacaacgtaaaatctttcgatagactgaacataaaaccctttaacctagaggaagctgtcaaatggtatcaacagacaagagttgtattcaagctttaagtccggcccaggaattggctctggcgatcaaaattgcagcagaagcccacctgaatcagaaagataagggtggtaacccgtacatccttcatccgctgaaggtaatgcactacctgaagaccgatgattttcagcttatggctatcgccgcgcttcatgatgtggttgaagacaccgatgttaccgctgcggatctggttctgctaggcttctcgaaccgtgtgaaggatgctgtggttcttctgacgaaaacccctaatcagacaccggaagagtattttaaccgcctggcccaaaactatgatgcggtacgtgtgaagcttgcagacctgcgccataactctgatgttcgtcgtctgaaaggtctgacagataaggatttgttacgtgtccgtaagtatcatgacatgtatcttcgtctgacaaagatgaaagaacaccatgaagctattaacatgttggctacattatgatcattacgaaaaaatcaaatggcctcccttggttcgaaatggaaattcctgacaaggttgtagtatgtgcgagatgtttttccacttataacctgaaagatgctcctgtaaaggctcccgatcagcttcggattaaggaaccttgttgcccgaactgtggttttaaatggtatttgtcatgaacctcttgacactgcttcgcacaaacaagtatactcagaaatagatgggattcctgctgggaatgtctaaaatgtgggcgtttcggcccttggcgaggaagatataaggagaagaaaaatgcctaactggaaaactgctctggacctccgcgatatctgggataaacggaatggtgaatgcggcagagaagactggacagataagacggtccatgagcttgctaaagagatagcccgtcgtcttgaacggaaattccctcttgagtcaaactatgacaacttggataatggctgcgattatgagctgtgcgatataatcggctatttccgggatgttccaacacaccaagattggttagcctctattgaagaatgtgagaatgagggatatgatgctgatcctattcgtcattatacacccttgcgggaattcaacgacatcatgaatgatttttatgattggtgtgatgaaaatcgcgtatgggtggataaataatcattgcaatgggggaggatcaaatgtatcctgctcccgaatttaatttacaggagacaaataatgtcaagtcgcaacatcttttctggtaactggatcactttacgtgaccttccaccactggtacaattttgccagcgtcacaaacgttcactgatgatcttcggcggggcaggtattggtaaaagtcaggctgtgaagcaaattgcggattctcttttcgggcctggtgataacctggtagactttcgcttggctgataaagataacaccgacctcaccggggtgcagattccatataccgatgacaatggtgttactcgcacagtgtacgccttgccggatttctggcctcgtgatcctaactggaaaggtattgtgttccttgacgaacttctccacgcagagccttaccttcagaaactggcattccaaataatgctggaccgtcgaatcgggacctatcagttcccggaaggggctgtactggttgctgcgggtaaccgtgctggggatggtactgccgtgactgcactggaagcccctttggctaaccgtatgatgctggtagagctaacctatagcgcatcggtgttcatcgaagactatgccatgcagaacggtattcattcgtcaatcattggttttctgtctcgtaagaacagtgctattgaaaactatgaagaaatgctggatatcgggtgtccttctttcgccacaccgcgtactttaacttacgccagtgatgtattgtacgattacgatgctaatttgctgcctgccaacctagctaaagtggcccttcagggcttcattggcacacctttaatggctgaactgtgggcataccacaccaagatccgtaatatggttccgatcgaagacgttatgaacggtactgccaaagatcctggagaccttccatcagacagcctgtggattttgggttcagaaggcgctatttggttgcgtaaggctattgcggataccaactacacggatgaccagattattgaattctctggaaacttccttcagtatctttacgatcactttatggaccagaaccgagacttcgtaagctctatcttcctgtcgttcattaaggaaaatgcgtttggtaaagctttgttgaccactgcgagcaaccgtgacaagcttcctgcacgtttgttgaaggcaaagcctatcataatgaaaattatggcagacttccaggtcaactacgctgaagatattaagcttattgaaggaaaataatattgacagcccctcctggggctgttatgctttatgtatcaaacaaaacgaggatatactcatgccgaaattaaactggaaagaagcacagcaggctatgcgtgaaggtaaacgtgtccgtaaccaatatttcacttctgacgagtggtttgaaatggttgatgggtgtatctacgcagaagacggttgccctatggcaggctggtatcgtggtgaagcatggcaggatgaaggctggagtgtgatcgaatgatctacaaaaaccaattccgtaatgtctggcgcaagtttgttaacggtaaaggctatgtgtcttgtgaccaaggcctcacttggacagaaaacggtgcccctgaggacttgatcaagcgattaccttattacgtggaggttaaagtatgagtcgcagacctggtttcggttatatctacattcccgattttactggggaagagcgccttgttaggatcagtgaccttgacatcagtgatattgaaaaccaggcgcaatatggacaggctggaaaagagtgttatcttcgtacagacaatggcttctgtcagtcaggctggacatctggcataactgcaatggaagttcttgagaagatcgctaaacacgataaagataatcttggggcctttcgtgattatgcccatcgtaaccggattgtcctcatgaagggggaattatggtaaaaaacttttcgaattttgacgagatcccttcttctgtaccgattactgaagaacatttcaaaaatgtcggaggtgctaatgacctagtgcaggcatatcagccacactggttcgatatcgaggcgatgatctgtttctttacacactgcatggtgtatggggaccgtgaaactttccgccctgcatatgagcgtgtccaaagtttggctgatgaagtgagggaattcggttggaatgaggaccgtgttcgccgttgcaaggctctcggagggcttgaaaaagaggtctatgaggtctaccctcatctttttgtacaacaggggtgatgaatgaaccttcagaacattgggccagagttaacagaagaccagaaagaagaactggaaaaggtccgtgaagccctcaaaaaaatggttggcgatagaaagattgttgttcttggttgtggtaatcctgtggggtactcaacactagcttctttgtgggatgcagaaaccatttctttggacgcgatatctgcccgtcctgcaaacaatatcattatgattgataatgatgatgttgactatgctaagtttaagatcgttaaggggcgtggtcacaacaaactaaagaagaaaaagaagaagaggaaataatggcaaaattcaaattcccagtttctgaactaaacgagtgttggtggcttgacaccgccgactgtgttatggcaggatacacctatcgacggcatcgggtgtttgttgtctgtgcgaaaaatcgtgcggatgctattgaatccatgaaagagtttaaagagaggagttgtaaatgaaagttaaaatgaccgcaagttacagcgaacaagggcacgccccccaaaaaggtgatattctggatgttctggaggaagtgtataatgggacatttattgactattaccgttgtgagtggaaaggccaagacctcgatatctatccatacgaatgtgaggaagtgcgatgagcttcaaatacaaagttggtgacctgatcgatgctgcaaaaagcggtgagattaatgtctttggacatggcgcaaactgtttttgcacaatggggagcggaatcgccccgttgatcaaagaagcattccctaagatgtacgctgccgatctgaaaactgagaagggcgataagaccaagctgggaacctgtacaatggcctttttgaatgatgggtctctcgcaggatttaatctgtactcacaatacggctataatcgccgtaaacagggcctcagggaccttgattacaatgccctgtatgattcaatggtcgagatgaaaaagctcttacagagctatacagacggtcctatggatacctaccgaatcgggttccctaaaatcggtgcaggccttgcaggtggggactggaatgtcatcgaagcaatgatcaaatcaatcttctttgattgtgatgtgacagtttatgtcttgaaagaatgggaaatccctggttactacccttcagacgacggccctctgacatcagaacagatcgctgccattcgggaaatgacaaaatgtggattatccacagggtggactggattatcgtggttaaattgagagacggtatggtagcacatacaaaaagatcgacctttacgtgggtaatacggtgttaacctataacgcccctcgtggtcagagctttgccatactactacttggggtagagaaaccaagtggtgacggcacgggtattcagattgacgaatggctgaatagtcgtggctggaagctggagggtcctgatgagtaaatcggtttttgtcatctatgacactgttgacagatgcctctggaaccacaaagccaagattggatggattagctctggcgctgccaagaatgcgtggaatcttgtccacgcaacatggagtgggaagcagtattttgatgaccaacaaagatatgtagttcttgaactttctggcggacacattagcaaattatttgaggagaataaaattgacaaaaccaattaaatacccaagcaccgcacagttccgtcaggttatccgcaccatgcatgataaactgacgttcgacggtattgatgaagagggtaatatcaagcggaaggtgttgccaccggaagcgtacctgatcccgtacatcggtacggttaagcttcacggcactaatggcagtgtggtattccactctgaggatgaagttgccttccagtccaaagagcgtgtcgtgactgtaggtgacgataacaatggcttcgcggccttcatgtctcgaaaagacaccgcagagttgctttctcaggttaaatatctgtgtgaagtcaatgacgttgagttccagttcccggttgaaattgctggtgaatgggctggtcgtggcattcagaaaggtgttgccatcactgaggtagagccattctttgctatcttccgtgtggctgtgggccgggatgaggcaacggataccctcaactggctaccgccaacgttccagtttggaattggattgccggatgctcgtatctacagtatccttgacttcggttactggatggctaatatcccattcaatgagccggaacttgtccagaatgacctggcagaactgactcgtgaagtggaaaacaaatgcccggcaggtaagttctttggcgtagaaggtatcggtgaaggcattgtctggtctccaaaagatcctgagctttctaaaatctctggcctgtggtttaaagttaagggtgataaacattctgtatccaaagttaagaccctggcggcaatcgacccagaacgcctcgcaagtatgcgtgagttcgttgagtacgctgtgacggaagcacgtcttgagcagggtgttagcgaagtcggtcttgaccagactaagattggtgaattcattggatggattaaccgagacatcaacaaggaagagggtgatgttctggaagccagctccatgaccatgaaagatgttggtaagtttatcagcaacaaagctcgtgcatggtacatgactcgtctgagtgaggagggctaatggccctcattgtagccacaacgcggtctgttgaaaaaagacctggacattctttcaccgagtgtgataccttgattttcgaagatgaagaacacggcaaaaagtttgttaaagagaacaaacagtttgtctatcatgtccaaaaagcgagggtcattaagaatggtgagaccagaaccgaagtttaaagtcgggcagatagtcaaagatacttggagcggcaagataggccctatttcaaccatgtacttttcagaaggggatgagtacaacaaggccgaatgggcatattctatagaccatatcgggtggttattccatccagagtcggacttggaggtggtaaatgggccgcgttaatacttagcagtgaaattaaaacatgcaaaggagcaatctatggttaaagtgaatggtaataccatcacgatcaacgggaataccgtggttaatggtgacattattggtggggacttgagtatttctgcaaatggggataaaatcctcatcaacggaaaagaagtctataccacttctgataaaaacattatcgtggtcatccacggaaataccgggagcataaacaccacatctggggatgtgaaggtgtatggcacagcaggtaatgttaagactgtttctggtgatgtccgtatcgaaacagggtcacttgcagatgtgaccaccgtctcgggagacgttatagcagaaaccattgaaggtaatgttagaacagtctcaggagatgtctctcaccgtcgttgatatacagccccgcaatggggctttttaatttggagtgtaaatttgaaattgaaaaatattattttggcaaccgcctgtatcctttctctgactaccacacctgtcttagccaaagaaagtgtaaagaagcccaaggtgattcatctatgcaagaaagatgacacagcggtaaacatcttagcctgcaacatgtacaaagaagctcgtggggagagtgattccgggttaatgtcgatcgcattcgtaactttgaatcgtaaggataacgataagtaccctgggacagtaaagaagatcgtctaccagccaggacaattctcctggacatcttcaggaacaacgtttaaagtctatgaaaaggatcgctgggagaaggcacaagagtttgcaaaagttctgatcaagattcataaacaaaacagggtcgtctacgatgctctggacataacacacggggccactcactaccattcacgaaaagtaaaaccctactggacaaaggccatgctacgcacagtcaggatcgataaccatatctattataaagagaaagaagattctcagggggcatgaactcatgaagaaattcttagtgatatttgtttgcattacccctctgtgtgtgatattgtcactgtcacagcccatatattgggaacaaatttgtggagcatacgcaataggtatggctacagcggcctttagactaaatacaaacaactgcaaaaagtaggagaagtag

SEQ ID NO: 51 - DNA, 166943 bp, unidentified
  source 1..166943: mol_type = genomic DNA
atgctcttctcattttttagtccgatagattattctgcaaagaccgtaaaaggtgctaaggcaaaagctatcccaaccgctgacatatttcgtaattatcgcaaatatttcgacactgtagcagaaaactatcttttacaaacatattacataagtggagctcctagaccagaagaattagcatatattctttatggaaatagtcagctgtactggattcttttaatgtgcaataacgtatatgacccgtttagagattggattaaaacccaggatgcatgctatcaatttgcacaacaaaaatatgcagatgtaggtggagaccaaatactctatcacgtggatgcaaacggcaatcgttattataacctcgagcaatatcctgaaaattcaggcatttggtatgataaaggcgactttaatcatcagtaccctcaatatactggggctttagctggtgttgacatttatgaagactctattatagaaaatgaaaaactgcgccaaataaacattatcaatcctagtgatattgaagcatttctttctgatattatacgagaaatggaaaaagcacctgacagtgaatacgaatcaggccggtacaaatcccagactaccatcggagaagttttatgattgaaatgaacgattcattaaaatggtttaccggtgttgttgaagacagacaagacccgttgaaacaaggaagagtgcgagtacgtgtttatgggcttcatccatttgaaaaggtgcaaggagctataaccggtcttcctactgaagaccttccctggatgtcagtgattcagcctaccaactcagctgggatttctggagttggctcatctataaccggaatggtagaaggaacatcggtgtttgggttatggcttgatgaattcaaaacagcaggactagtaataggaacatattctgcgcatagaaaaacgaagccaaactatacagaaggattttctgaccctacaggtcaatatcctagacaggtcgggtcagataccaacccactagttcaaggcgatgaaactgggtatagtgctataccaaatatcatccaagacagaaatttagacattggcattaatcctgatgatgctgacttaagtgatattcctgaagacccaaatcctgcaattacaataacagatatgcttaatagggatgaaggtcttagattgaaggtctactgggacacagaaggatatcctacagtcggtattggacaccttatcatggcgcaaaaagtacgtgatatgtctgtcattaataaaactttatctaatcaggttggtcgtactgttacgggaaatcccggtatcattacaatggacgaagcagtcgcgttatttaagcaagaccgcgataaaatgctttctgatattaaaacgaattcacgtgtaggacctgtatatgctaaagtcaacaaatcaaggcaaatggctttagaaaatatgagttttcaaatgggcgtaggtggattagcaaaatttggtaaaatgcttgatgccatgctcattggtgattggaaaaccgcttatacagaagcaagaaactctgtttggtttaatcagacaaaaggtcgtgcttctcgtgtttccatgattattctaacgggtaatatggaatcatatggagttcctgctccaaagccagaaggaaaaaacctgtctgctgcttacgtagaaccaaagtctggagggaatcctgaagacccatggactccggaagattcaagaattcttttcaaagaacctgagtcttcatataatggtcagtatccatatgttcacacaatggaaacagaatcaggtcatatccaagagtttgatgatacacctggctatgaacgttatcgtattgttcacccaacaggttcatacgaagaagtagctcccgatggacgccgtaccagaaaaactgtagctgatttatatgacatgactcagggcgatggaaatattttaatctctggggataagaaggttaacgttggagggaacgagacctattataacatgtataatcgtcgacagcaaattgatggcgataacacgctttatgtacgtggaaatgaaactaaaactattgaaggcgatggtactatttttgtcaagggtaacattaagatagtcgttgaaggaaatgctgatatccaagtcaacggtgatgccactactaaagtagatggcaaccacgacgtaaccgtcggtggtaacttaacttggcaagtagcaggtactgtgaattggaatgttggtggggcttggactgagacaatggcttctatgagctcaatcgcccaaggtcaatacactgttgatggttcacgaattgatgtaggttaatcatggctgatatacttcctattaataccacgttacgcgaagtaatagaaggtgaatacgttgagcagtactttactgctcaattatctaccaacgaaacattaaaatcaataaatattatcgactatcaaccagtatctgatatctctgtgtctgaaacctattataaaggtaattataactcagtttttacttttggaaacgatgtgcttaaataccgtgaaggcgatgagctgaagtccgcttcagcgtgggaggatttacctaatcccaaaactgctgatttatatctgtggaaagcccccagaacactagagaagacatttacctatacagttgagataatatatacagtgacagaagaatcgtctggaggttcatccggaggttctagtgctccaatcgtaacagaatataaaaagcaaaaggtttactctcaaaccgttaaaggtaactggagcagatggggcgaccaacttcgtgcttacgtatatgcggggaattaaatggctggtctttcatatgataaatgcgtaactgccgggcatagtgcgtatcctccgacagaagtaaatgctacacaaagtaaagtattcactggtggaatagcggtattagttgatggtgactcaattacaccgcacaccaagacggttgaccctcatgatacgcatggaggagttgttcaacctcgcacatccaaggtatttgtaacaggcaaaaaagctgttcaaatggccgatccaatttcttgcggcgacactgtcgcgcaatcaagctcaaaggtattcatacactaatggctattaaagaacctttaaattatcagttaacgcgtactgcaaacgctatcccagacgcatttactggagcaacattcgacgaaattaaaaatcagcttattaactggcttagcgggcaaaaagagtttcaagactttgattttgcaggttcgcgtttaaacgtgctattagacttattagcatataacacgctttacatacagcaatttagtaatactgctttatacgaaagctttattggaacagctaacttgagaagttccgttgttcaagcagctcagcaaaacgggtatttgccaagttccaaatcagcggctactgcatctattatgcttgaggtaactcatccaaatccagagccagcaataaaaatacctcgtggaaccaagtttttagcatatgcacgagattcatcagtagacccatacaactttgttgttactgaaaatgttattgcgctaagagatacttcagcaccagaaggggttaatagatatcttcctattgtcaatttggcgcagggacgtattattcgtactcagttgtcatatgacccgaagaaacctattgttattcgtgatcagtcgattgaccgtaagcaggttaagctgtgggttgatggcgctgaatggactaactggacagacaggtcaatggttcatgcttcatccatttcaacaatttattatatgcgtgaaactgtcgacggaaataccgaattcttctttggtgagggtgtggcagaagcatctgtggcaggaggagttcttgaaagcaacttcatcggcggattgaagcctactaagggtgcgcaagtcgttattgaatatattcgtactgatggtgaagctgcgaatggtgcgactgatttcagctatgctgataccctgcaatatatcgtagtaaacaaaatcattgaaaactggtcagattctcctgattatgttggtgctgatggtggtggggaacctgaagacatcgagcgtattcgtgagctcgcccagattaagcgcgaatctcaaatgcgttgcgtgtctaaaactgactatgagtcattcgttagctcgcgatttggttctattgtgcaggcagtacagtgctttaccgaccaagataagccagggtatgcgtttattgcaattaagccaaaatctggactgcagttaaccgctgttcaaagagaagacatccaagattatcttcgtccattctgtcttgctcccattaccccttcggtaatgagtccagactacttgttcatccgtcacaatattaaagcctcttacgcgctgaataagttacaagaatctgagcagtggttacagtcaaaaattatagactcaattaatagatattacgttgatgaagttgaaatgtttaacaaaaatttcagtaaatctaaattattgacctatattgatgatactgaccattcaatcatcggttcttctgttgatattcagatggttcgtgaaattgtcaactatttcactcttcctagcgcaggtattaaatactataatactattactccgcggacgttacgttctggtgatttggtctttactgtcactccaaccgcagattcatatccagttaatatcgttggaactgacccagataaaaatggtaaaggaaatatggtcattggaccatttaaaccaggtgatattaaagagaatactcatattcagccatatactgaagacgattttgatagaactgctaatggagaaagaactcgttggtacaaaatcggtgaagtagattattatggtgataatatttactggagccttggagctattggagccgatcctcttcagtttgaagaccaaagtattgagctttattctactcctacccaggatatcgtcttcgcccgcgatggaacacttatcgtatttgagaatgaccttcgtcctcaatacacaactattaaattggagcctattactcaatgacaattgcaccgttcgtcaccagcttacgaattcataagctatctgcgaatcaggtcaatattcgttgggatgacgttggtgcaaacttctactattttgtagaactggccgaaactcgaaacagagcgggggaagttatccccgctgataatttgagttggtcttcactgggttataccgcggataatgattggttcgaacaaaatcgtattgaaccgcttacttattataaaatgcgtgttcaaactacgtcagcagggtttgagccgtctgaatgggttgaaacagaagagttccaaactttcgaagaaaacgcatacacatttgagcatatgcaagaattcagtttagtgaaagaattcattaaacagaagttttctttaaacaacatgtcgtatgttaacttcaacacatctgccatgatggcgtctttgatgactgagtcttttcagtttagtcctgaatattctcatttatcagctattgaaaacttcgttgtaggtgaatctggatatcatgaaattcagggacctattgaagcagtgtgtgttgataaaaatagaactatgctgggagaaatagacggaattttgtatctgtttgaaagattccaacatatggttaaagtatcaaatgataaaggacagaattggcaatacgttcagttatttaatgaccgcgtcggaaatccggtttctagagtggtaatttatcaatctaaaactacttcttatgttttaggatatgataaaatcttttacggaaggaaatcatctgacgtgcgctggtcatcaaacgaggttaagtttagcgataacgaagttacatttgctaaattgggagaccagttaaagcttggctttgaagtagaattattcggaacgtatgcatcattgcctgctgacgttaccaaatatgctgaagcgtttacatgtaatgatgactatttgtacgttgttgcaaaagacactgtccgtaaagttaaattaaaagatgctccaatagatactgaccctttaagtcctacatttggtgaaaaggtgtttgaaaaggaagtatctcatataacaggcaatcctaaatctgtatgctttaaaatggattccgttggaggcaaaatctttgcccttattaccggggaagttaaaaccttaggattagacccaacagacccaaggaacgttgtggattctgcaactaaaggcgtctatgtttaccaggaaggcacaaatacttggaagcgtgtatttggtaataccgatgaagaaaaacgtcgtatagagcatttatggacttctatgtcaactgacggaaaggaaatattcttttcatcagctaattttaagacaacagagtacgctcaggatattgagcttgagacgaaatatccagaactaatttctaccgcagttaaaaatgttaacccaattcagtatcactctgataagcattatcacatgatgagtttcagagcagatgaattttcaagatgggaaacatttgttcctggacctatgaggttttatgctgaaccgtggtttgtctggatggctcgtgaaggcaacagatgctggataagtacagctgaccatgcagttgtcatttataatgatattctttatcaaaaaagagtagatgcagcggcgcaggtaactaccgagcgtattctttcggaagtgtgggataaaggtgacgcaacgttttattgccctccagtttcatttaatggatttttgcagtatgcttctggcatcatgtttcacgaaccagacggaaaactgataggctattacgcatttgactaccgtgttcgtgaccaggtaacgcttaactggaaaccaactgatgtaatgtttaaggcgtttctgcagaaccaaacacgggaagaagactggacacctgagcatactccaggcttacgtgacccagatttgcgtccgtatcttactaaaatgatgccggatagttacttgctacaagatagtaattttgagcacttttgtaagtactatctccaattcctttcagatggaaatggaacacattacaacagtctcgttaatcttgttaagaacaagtatcctcgcgaagaaaatgcatgggaatatctgtggtcagaagtttataaacgcaacatttatctgagtaaagacgctcgtgacgctgtcgtccgtttctttgaagcacgcaagaatgatttctatgctactaaaggaattgaagactcatataagttcctgtttaaacttctttataacgaagacgtcgaaatcgatattgagtcaaagaacactaccgaatatgacattattgttgaaagcacaaatatttctgatgatttagttggtcgtacgatttatactgcttccggtcgtagtaatgtgacttatatcgagagagaataccgggatggtcgtctgttatggcgtattactattcataacttatcaggacggttcattgaaggccaggaaattaaatcagagcgtacggactttgagggtattatagttcaaggtgttcgtggaaaggatatgctgagtaataacattgattatataaaccgcagccgttcttactatgttatgaaaattaagtctcagcttcctacttctcgtttccgcgacgatgtattaaggtttgttcatccggtaggtttcggtttcattggtataacattgctgacaatgtttatcaatagtggcttaaatatgaagcatgttgagactatcataaataaactcaagaactataaatgggatgcaggactgccatcagtttatcctgatagagttgctattatcgcttcagatgatacaatagaaagagacccaataaccaatgagcctaggtattcttcacgtgctcaagctggtgaacctttcccgttacctgctaactataatcaagaaaataacaatagtgttatcgctggacaaaatcctggacaacgacgtaaaccgttaagtcctacgtttgaccaatcagcagtaacgtttgctaattatcgcgatttagttaaccaacgtcttaaagacgatgcaggtaatcctcgcgatcctgaaaatccgacacaggtaaaaattgatgagtaattcaacaagagcaagttcaacgcgtagcacgatttatcgtgctatcattacatctaagtttagaactgaaaagatgtacacattttataaatcaattggtccgggaacggaccaaaacacattgtatgtttcatttggaaaaagcactccatggtcagataacgaatctgaacctgggtttgcacctccatacccggccgataatgaagacggtgtggttgatatttggacaaatatgatgggtgcagttaaaattgaatcatctatgcttgactgtgttgttccaagaagagactggggagatacaagatatcctaatccacgcacatttttaatcggcgatatcgttgttgctaactctgcgccatataacagaactgatgctggatttggatggatggtatatagatgtattgatgttccaaagaatggaatgtgttcaattggtaatcttacaagcaaagaagaatgtattaagcttgggggtaaatggacgccatccactatttccggttcagcgcctcgtgggcgtggtgatgcaaacggtaccgtcgatttgggtgatggatatctttgggaatatctatatgaaattccagccgacgtatcaattaacagatgtacaaatgaatatatcgtagttccttggccagaagagattgaagaatctccagcccgttggggatttcaaaacaacttaacttggcaacaaaacgactttaatttgatttatcgcatgaaatgcaatactatcaggtttaaagcgtatcttgatgcggtttattttccggagttcagtcttccaggaaataccggatttagacagctatcaattataactaatccgcttgaagttaagccaatgccaaattctcctaacgttaaggctgaaaaaggttggtatagcgcttctggtcttgaaagacagtcaggtgaaatgatttacatggaaaatcggcaacctattatacgttcaatggaccaaacagaagagttaaatttaattttcgagttttaattatggggagcctttggctccccatttttatataaataagactatactttgatatgaggttaacctatgtatacagataagggtaaaaaaataattgacgtcggtgagatcggtaatgcttctaccggcgacattctgtatgatggcggtgtgaaaattaatgataacttcgacgccatttataacgccttcgctgatcaacgattatttgcagccggtggtggagctttaaaccaaaaaatccacgcaacaagttattatcaaaagataaaatttggtgatgctaactctgcagggacagttccaatggggtcatgcatagatgctgattgctcagaaggggcagttcaaattcgtctttcaaaaggtaaagcgggagaagctgtattcgttgtaaatagtaatggctcagcatcaaaagctagatccataaaaataacaacaaatggcgaaggtgtagcagatgcatttaaagatggatcgcgagagttgattatcaacacgccaagatgtagaattgaattgtggtgtgttgaagtcaaagctaacggtgctgcagtttgggattattcaatttcaagtatgtttggcagcacatattcgccgttagaagctacatataatttaacgagttctcctattaatattcggcttggatataacgatgattactctactgttaaattgttattaagcttcagcgcaaatccaggtggtcaaaccatcaaaaggcaatcatctgaagtcatgcttatgattgacccgactattacttcatcagcgccaaacggaagagtatttgacactgaatatgcagtgttaagaagcggtgaatcatctgaaaatgaaaagatgtattctatttcatactctattaacgcgcagaaagatttaatatgcacagcttcaacatcttatggaaacgcccgtttggcagttaaagttattgctacacagaccgtaggggtatctcaataatgaaacaaaatttgatagtaggccaatctgtagatgatgggtctggtgattacctccgtaaaggtggtcttaaaattaataacaactttgatgatttatattcagagttaggtgatggttcagttccgttcgcagcaggtgcatggaaaacttttaaagctagtcctactggaactactttaaatgctaagtttggtcaggcctttgctattaatacccaggcagcaagagttaacgttcagcttccaaagggtacagccaacgactataacaaagttattaaacttcgtgatgtttggtcaacctggcgattaagcccaatcacagttattcctgctcaaggcgatacattaaagggttcagcttctcctaaaattttcaatactaacttccaagatttggaattggtttattgcgcccctggccgctgggaatatattgaaaataaaactgtagataagctaactaatggcaacttaagtactgtagcgaaaaaatcaattattgctactgctggtcagactgactttcttaacatttttgatggcgtagaatataacgaagactctcttaatgtatatcgtcgtggtaatattttatattacggcgaaaccagcgttatggataaagccaatgccgattacggttctcctggaacagtagcaggtcaattggtagaattaaacggtaaagacattcgtttaaaagttccatgcgttgaaggggaagtaataacatttgaaaccttcctagatggaattggtgtttatcggtcttcatacaacaagttggctatccagatacgagattcagcccagactacatcccagacgattcctgggtcaatgatagtagataaccttgctactctccgcagaatcactctggatgacatgggtgtacttccaggcgtaggggtaaatcctaactcgcttgaaatttcattgaacggaaaggaattacttgaagctggaactgctggtcttcctttattttattgtgaaggcgcggaaggtggatacgcagaagactgtataaacaatggtggtcaatgggtaaattctaaccaagattacagattagaatttgactcaactggtactaacgtcgaagctattatttttggtgaggcgtttgaagataaagaccttcttaccgtccgttggttcaataataacatcggtactactatggatattgacgatatcatggcagaaaccgaccaagtgtatatgaatgctgagcaattagtaactctaaaaaatcgcattgaatacacaaattatgatgaacctaatcagaaaaatatgcgtccggttgctgacgatattatgattaaagtcaataatattgcagcattttttgacgtaatttatccgattggcacgatttatgaaaacgctcacaaccacgcaaaccctgctgactatatgggatttggggtgtggaagctttattcacaaggccgtgttactgctggttggaataacgattcatctgatccttatttttcgcgtaacaacaataacttaaacgaaaatggtcagccatcattaacagcaggtggaacggttggagatttgacatttacgttaggaaaagaacacattcctgaactaatgtcaagagataaagttctaatttcagaccctgaacatggaagcgtagttatcggtggatgtcaattagacccagacgcgcagggaccaggttattctaaataccgtgaagacactgttgcggtaaacaatggtgtagttccaaatgacatcactaaaattcagccaacaatcaccgtttatcgttggattagggtaggttaaaatgacgattgaaactaaaactcgtgaaggagctaaagttaattcaagattagctgctttttcagaatatcgcgttgacccgcaaaatattgcggtaggaaatacggctcctatagggagcctaacctttgaacaaatggatttgggggtttggtatccaaatactgaagctgctattaatgatttgatgtcattgcagtcagcagaaattggaactattatttgcaatgacactggaatatctccacagcccgcacagcaaattacgcgtgctactttttcaggtgtcgttgcgttagagccaaaagaagacggctctgtcggtgacccagtaataattcatattcttggcttaccaattagaattgcaaacggtgatgactttgcagcagtagcaacacgttggtatgataaagtaaaagaattagaagctgttggaaaggttgttcaacaggttactcaatcgccggcaacaccccagtatgttgatattattcatttagattatcagaaccataattttgaaacatataaaaagtatggtttaactgttgaatttactattacttcaccagctaaagcaggttatggacaatgggatgctatcggcaacgaatctaaaaccttcggcgcgaacacatttactttccactattttagaaggatgggataatggcccagaataactataatcactacagtgatttggccaaatatacgatatttgacccaacaaatacacaatggcctgttgctataaaagacgtccaatcagcgttagagctgattggtagctgggcaagaactgataccggattacctgtagcatctcctacagtagccggtgtaattcgcacagcaacacaggctgaagttgatgctggaactattggtaatgctgcggtaactcctgctacattaaaatccacagttacccgtcctgaagcaactacagcagttcttggcttaacacggtatgctactaatactgaagccgcagcattaaccgcaggaaatagaactattaccgcggcggctctcggtcatgtgtttaaaactgtgaaagcccaagaaaacgtagatggaactgttaggttaactactgcggctcaagcacaagcaggaactgacgaaactaccgcagtaactcctaagcgtgttgtagaaatgattggaaagttcagtgtcagtcctcctagttatacctctgcgacagaaagcaacttgggattagttcgtgtcgcaacccaagcccaggtagcagcaggtgctgttcacgatggatacgcagtaactccaaaaaccttcatggcatcaaaagcgtctgacagtgtatttggtatagtaaaatttgctaaagactcagatgtggcttcagctacttctaacaatttggctgttactccaaaaagtcttcaagcgctaaaatccaccaaggataaatatggattaaccagattatcaggttctccaactactgatgcttcattggcagcggctgcaacagatgcagtctttaaaacccgtagaataaacggaaaaactcttgataatgacataacaattactaataatgatattaattgttatacaagacaagaatctgacgggcgttacatgccagctggaaccagagtaggtaatgttacttgggttgaaggacaatcttggattagtcgaggtgcaacgtttacatgtaatgcaccatgggaagcttctagtagattagctctaaatgttaatgtaaaatttgagcgtaacaacgacggatatgacaatcgtattttcagatttgttgtaatagttaacggttcccaatggggcggtgaacttactcttaacatcgaaaatactaaaggcggacgaaatggtcattcatggagatttgaagcttacgcatctagcaactttttcttcaataacattcctccaaatgccactgttcaaataagaccaacagaagacagtcgtattgtattttatgactgcatgcttacattctgtacaaatagaccgtaaggaataatatgaccaaactagtagattcgcttccgtttgtagacggaattccagacgattttcaacagagaattaactggataaaaaatacagagcctcttaatggggcttcaacccgctatggaaatgatggagaactgaatagagcttctgtgcagattcagaaaaatgtggttcaggtacataacgatttgaacaacgttggaactgctgtagaaaatattcaagtagatgtagaccaaatcaaaaaatcgttagaaattacaggttcttctgacgccattgagcaggtttatatcaataaaaagaatattgaaaagcatgatggacaaattcttaaattagaagaagacaccgaaaaacttcgaactgaccttgattttctcgaagaggatgtaggtgtttatgattctagtaaagatgactattacagaacagttcgtgataatatagtttgggttaaacgtgaaattggtgcgtatcctgggcaagatgttaacggacagcctaagcaagacgctccaggttctggtatgaaataccgaatcatcaataatgcgtcagctatagtaaaacatgacgagcgtattcaggcgctagaggatgcatacaatgattcagacgtaggttctctgactattgaagtaaacgacctgcgtaaagaagttggtcctaaatccggagctacgtcagcttcaatttatgcaaggcttgtgaataacgctgatgctatttccgcagctaataatgaaatctttgctattaaccaagccattgattttaccaatccagtaaaaattggagctcgtactactagattagaaaacgattatcgtatagttgacgcaacacttaactctgcacaaaccgggttagttcctcgtgtcaataatattgatgctcgtttggggtcttctgataagcctgatactattgaaggaaaaattagttctctttcaactgaccaagggtacatttctgatgttgtaggacgtgatacttcatcagggcttcagggtcaagtagcatggataaatcagcaagttggtattgttcctggcggacagccgattcctccggggtcaattttagcgagaatgaccaatgttgaagggatgcaaaactctcagcagtctgctatccaggacattcaagtagaacttggcaataacagcgaagggttaaaaggttctgtatttacgttacagactcaaatgaatggtgacttttcgtcagaaaatccggttcagcgggatggtgtgtatgccactgtagtagaattgcaagataaattcgtgactgcagttactgacgtagaacaagatggagcatacctccgtaaacggggcgaatggtttaagaagccttcatcaataggtgaattcagtaaagaagatttcactgttgatttaagttctgatgcattggtaaatcctaactcattggtcgctgcttcatttaatgctggcattcgtattgtcgatgatattattgttgatgacgatggcgtattttgtgtagaaactgatacagttatcaaagcttctgattcagataaagccgtccaaattgttattctcgtcaataacattgaggtgtttacttatagcctaggtgttaaagcagtaaccggcgagcagctgttgaaaaccaagaaacttattaagttttcgtctggcgatgcaatcaaaattgtgtatagagctgcttcagaagaatcaaaagttcctgttagtattaaatcattggatattactattcatccagcagtataatgaaagggacctccgggtccctttttcgtataaatagaatataaagaggagcttatatgtcatacaacacatacaacccaaaaacgcttaaagacgctatacttcgacgtctaggagcgccggtaattaatgtcgaagtaactgaagaccaaatttatgattgtattcaacgagcattagagttgtatggtgaataccactttaacggattgaataaaggctatcaagttttttatattggaaaagatgaagctgacaacgcaagatttttaaatggtgtgtttgatttgcgtggtcgtaatgtatttgctgtcactcaaatcgttagaacaaatgtaggttcattaacttcaatggatggtaatgctacctatccgtggtttactgactttttaatgggaatggccggaattaatggtggaatggggtcaagttgtaataagagttatggaccaaacgctttcggtgctgacctgggctattttactcaattaatgacttattggtcaatgatgcaggatttgcttgccccacttccagactattggtataactctgataatgaaatgcttaaagttatgggcaacttcatgaagggtgacatcattgtctgtgaatgctggaccaaatcatttatgaatacagatgtgatggtaggcaatacagcaggatacggatttgccgggccgcaaactgctgatcattggggcttaggagataggtatcagaatcctgaccttcgcaataacggccaatatgcaggtgaaggtaatacaaatagagaaggtgcttataataatcgttgggtaaaagattatgctacagcactgactaaaaaattgtggggtgaaattctgtttaaacaccaagggctacaattagccggcggcgttacagttgatggccaaacacttaaagtagaggcccaagaagaaatcgagaggctccgagaggaacttgatttacttgacccgggttgtcctattctgttggggtaaaagatgactacatttaattctagtttattcgctcgccttgaggattaccgaggatacaataaaactaatgagacagaaattctcaatccttatgtgaatttttataatcacagaaatagccaaacgttagcagatgttttatcagctgaggctattcaaatgagaggaattgagttttatttccttcctcgcgaatataacaatccggatttgcttttcggagaagacccatcaagtaaattcaccaaggcttggaaatttgctgcttacttagactcttttgacggttattctggtgataacacgttcttcagtaaatttggtatgatggttaatgatgaagtcaatttgactattaatcctaatttgttcaagcatcagaccaataattcagaaccaaaggcaggtgacctgatttatttcccgatggataattcgctgtttgaaattaattgggttcaaccatatgatccattttatcagttaggtcaaaatgttcaacgtaagattactgcgcagaaatacatttattctggtgagcagcttcaaccagaattgcagcgcaatgaaggaattatcattcctgagttctctgaacttgatttagaaccaatcaaaaacattgattctcttgctgatatttctgacgtacaatacgcagaaagcgatgcaattaataaagaagcctctgaatatgttcatccgtattatgttaataacggaagaggacttgagtctcctcctaaagcagattcgtttgatgacggattttttgaataaataaaataaagatgggacctttgggtcccttaggagaaatcatgtttggacattggtataattcgtccttacgccgatacattgtattgcttggagatttattttctcatgtacaaattgctcgttggcgtgaagacactggactaaaatatattaaagtacctatcacttatgcttcaaaggaaaagttcctttctcaactcggaaaatggactgctatccagtctaccgagaataaagcaaagatagaaaccgttttgccaagaatgaatttgcacttggttgatatgcaatacaacgcgatgtataaaacatcacagttgaatagaaccaaatcatataaaaccccttcaaaaattacatctcagtataatcctactccgattaagatgatttttgaattgggaatttatacgcgcaaccaagatgatatgtatcaaatcatcgagcaaatcgttccttattttcagccgcattttaacacgactataactgaactttacgacaaagacacgagctttaaccgtgatgttagaattgtattacaatcattttctcaggatgaagctgttgacggagataatattactcgtcgtagattagaatggtcattgatgtttgaagtcaacggatggctatatcctcctgttgccgagattgacggcgaaattagaaccatttatttggatttcttcgctaatagtaaagaattaacaccagaaggaaattttgaatctgtggatagcgaagttactccacgtgatgtccagcaagaaaactgggatggttctagcaaacagacgtattctcacgatattcctattccggtaaatccggaggctcctggaccgagaggtgaaaaatgagtgacttacaattagatatggctaaattactagacatcgaaggaattcccggaatagaagggcaagaaattccggtttatgaaaaattagaattagtcgaagttaaatctaatccaaatgatcgtaaacctgaccttgaagacgactattctgtcgttcgtaagaatatgcacttccaacaacaaatgttaatggacgcagctaaaatatttttggaaactgcaaagaacgctgattctcctagacatatggaagtatttgcaactcttatgggtcagatgaccacaactaacaaagaaattcttaagcttcataaagaaatgaaagacattacttctgagcaggttagtactggaaagggagctaatcctcatcaaggaatgaatattcaaaatgcaacagtctttgtagggtctaccgctgatatgatggatgaattcggtgatgcctatgaagcacaagaagctcgagagaaaatagtaaatggaacagactcaaccgtttaacgttctgagtgatgcccatcctttaaatgacgggaaacaggtggttattcgccacccgtctgaaatggaaacgaaaattgaaaacggagttcgtttctttaaatcgcaatgggatgataagtggtatcctgagaaatttgaagactatcttaagttgcatgggatagttaaaattcgtttgcaaggtgaagacccagctcatttccaaacgtttaaggacaaaaataataagcgcacccgctatatgggattgccaaaccttaaacgagcaaatattaaaatgcagttgacgcgtgaaatagttgcagaatggaagaaatgccgagacgatattgtgtacttcgcagagacctactgtgcaattactcacattgactatggtaccattaaagtccagcttcgtgattaccagagggacatgctggaaatcatggcggctaaacgtatgacttgttgtaaccttagtcgccagcttggtaaaaccactgtagtagcaatattccttgcgcactttgtctgttttaacaaggataaagcggtaggtattcttgcgcacaaaggctcaatgtctgcggaagttctcgaccgtactaagcaagcaattgaactgcttcccgactttcttcaacctggcattgttgaatggaacaaaggctcaatcgaattagataatggttcatctattggagcgtatgcttcaagtcctgacgccgttcgtggtaactcatttgcaatgatttacattgacgaatgtgcgtttattccaaacttcatcgatgcatggcttgctattcaaccagttatttcatcaggtcgtcgttctaaaattattatcacgactacaccgagtggattaaaccacttttatgatatttggactgcggcggttgaaggtaaatccggctttactccttatactgcaatttggaactcagtaaaagaacgcctatataacgacgaagatatgtttgatgatgggtggcaatggtcacttcaaactatcagtgcttcttctcttgaacagttcaagcaagagcactgcgctgaattccatggcacatccggtactcttatttccggtatgaaacttgctaatatggattggattgaagttactcctgactcacacgggttttataaattcaaagaagctgaagcagaccacaagtatattgcaacccttgactctgctgaaggacgagggcaggattaccatgcactaaatattattgacgtaaccacatctgagtgggaacaagttggagtattacattctaatacaatttctcacttaatcctcccggatatagttattaaatatctaatggagtacaacgaagctccgatctatatagaacttaactctacaggtgtttctgtagcgaagagtctttatatggatttagaatatgagaatgtcatttgcgattcaatagttgatttaggaatgaaacagacgaaaaggtcaaaagccgtcggatgttctgcactaaaagaccttatcgaaaaagataaactcattattcaccatcgtgctactgttcaagaatttcgtactttctctgagaaaggagtatcctgggcggcagaagatggatatcatgacgatttaattatgtcactcgtaattttcgcatggttaacaacacagcaaaaatttgctgatttcgtggataaagatgaaatgcgattagcatctgaagtttttaaacgcgaattagaagatatgaacgacgattacgctcctgtagtgttcgttgacgccgtgaatagcgcagaatatgcgcctcaagaacatggtctttcatttgtataaataataaaaagcaaacaacattgaggatatatcatgcctttagtctctcctggaattgagctcaaagaaacgagcgtacagagcacggtagtacttaacgctacaggtcgtgccgcaattgtcgggaagttccaatggggtcctgcatatcaagttactcaaatcactaatgaagttgaactggttgatatgtttggcggccctaataaccaaactgctgattactttatgtcagcaatgaactttctgcaatatggtaatgatctacgcaccgtccgtgtagttaaccgtgaagctgctaaaaacgcatctccattggttgataatattgaatggactatcactactgctggtagtaactatgaagttggtgataaaattacggttaaatatgcagaccaaactgtagatgacaccggttcagttactgcggtagatagtgacggaaaaattaagtcggtgttcattccgacatcgaagattattgcatatgcaaaaagcattaatcagtacccagatttagggtcttcgtggacaactaccattacttcacagagttctggtgtttccgctgtcattactttaggtaaaattatttctgagtctacagttttactgactgagcatgaaactgcccatgaagaaatgacaaaaaccgaattccagactgctcttgctaagtataaaatgcctggaattgtagctgcgtatcctggcgagctcggaaatcagttagaaattgaaatcgtatcaaaagctgcatttgataaaggtgaacagctgacgatttatccggctggtggaaaacgcgcttcgactgcaaaagctgtatttggatatggtcctcagaccgatacccaatatgctatcattgttcgtagagatggcgcggtagttgaatcaacggtgttatcaacaaaccgtcaagataaagacatctacggaaataacatctttatggacgattatttctccaaaggttcttcacgttatatatttgctactgcacaaggatggcctgaaggattttccggtgttattcgtctgggtggtggggtttcagctaatgaatcagttactgctggcgatttaattcaaggttgggatttatttggtgaccgtgaagcattgcgtgtaaaccttctgattgctggtgcttgcgctggtgaaactgatgaaatcgcaagtacagtgcaaaaacatgtgtcgtctattgcagatgaacgtcaagattgtttagcactcatttcaccaccaaggtcaacgattgtaaatattcctctgacccgtgctgttgataatttaattgattggcgtcaaggtgaaggaagctacgactctgcaaacatgaacatcaatactacgtatgcggcaattgacggcaactataaatatcagtatgataaatataacgacgtaaaccgttgggttccgttagctgctgatattgcaggactgtgtgctcgtacagatgatgttgctcaaccttggatgtcaccggctggttatcgtcgtggtcagattctgaactgcattaaacttgcgattgaacctcgtcaagcacatcgtgaccgtatgtatcaagcaggtattaacccggtaacgggtcaaggtaccggtgatggtttcattctgtttggtgataagactgcaaccactgttccaactccgtttgaccgaattaacgttcgtcgcttgtttaacatgctgaagaacaacatcggtgattcttctaagtggcagctgtttgaattaaacgataactttacccgtagttctttccgtatggaaaccagccaatacctcgcaggtattaaagctctgggtggtgtatatgacttccgagttgtatgtgataccacgaacaacactccagcagttatcgaccgcaacgagtttgtagcgagcttctacatcaagccggcacgttcaattaactatatcactctgaacttcgttgctacggcaaccggtgcagattttgatgagttgattggaccacagtaatatgaaccccaggacattctggggtcatctaatctttagatgataaattatattaccgcacactttaatagcctctacgatgatgtagtcaatcgagaggctatataaatatctataggaaacaacgatggaattaacagacatcactcgtgcgtttgaatctggtgactttgcgcgtcctaacctgtttgaggtagaaattccttatctgggtcgtaacttcagtttcaaatgtaaagcagcaccgatgccggcaggtatcgtagaaaaagttccagtcgggtacatgaaccgtaagattaacgtcgctggtgaccgtacttatgacgactggactgttaccatctataacgatgataaacatgaagtacgtaaggcaattattgcttggcaggctcaggcccacgcccaaggcaatgatatctctggtatgactccagctgattacaaaaaggttgctacggtacgccagtttagtcgtgatggcaaaactatcacaaatgaacacaccattactggtctgtggccaactaacgttggtgaagtacagatggattgggacagtaacaatgaggtagaaacgttcgaaactacctttgctattgactggtgggaataatgctatggggcttcggccccgtatcgaagttctgtgagttatttgcttaaatatctgacaaaacttcgatataaatatacttatagataatttcggagactccaatggcctttcatattttggacttattcgctccgtgggaaaaacgcgacgaagctgaatataagcaacaaatcaacaatgacctagagtcaatcactgctccaaaatttgatgatggagctcgtgaagttgaatcaaacgaaaacgaaatccagtataattcattcaaccaaatgatgtttggttccaatgaacctggaatgaaaacaactgctgatttaatcaacacttatcgtagtttaatgaataactacgaagttgacaatgctgttgaagaaatagtttctgacgcggttgtatacgaagacggtcacccagtagtttctcttgatttagattctaccgatttcagtcaagcaattaaagaccgcattcttgaagaatttaatacagttttaacatgccttaatttcgagagaaagggcgctgaccatttccgccgttggtatgttgactcaagaatattcttccataaaatcgtcaacaccaagaaaatgaaagacggaattcaggaactgagacgtcttgacccgcgcaacttacaattcattcgcgaaatcgttactgctgatgacgctggtactaaaatcgttaaggggtacaaagagtatttcatttacgatactggcaaagaaagttattacgcagatggtagattatattccgccggaacaaaaattaaaattccacgcgatgctatagtatatgcacattctggattagttgattgttcaggtcaaaacatcatcggttatttacaccgagccgttaaacccgccaaccagttaaagctattagaagatgcgttggtaatttatcgtattactcgtgctcctgaccgtcgtgtgttttacattgacactggtaatatgccttctcgtaaagcggcagcccatatgcaacatattatgaacacgatgaaaaatcgcgttgtgtatgatgcatcaaccggtaagattaaaaatcagcaacataatatgtcaatgacagaagactattggttgcagcgtagagatggtaaagcagttactgaagtagatactcttcctggtatgtccggtatgagtgatatggatgacgtccgttactttagaacagcgttatacatggcattgcgagttcctctttcgcgcatgccggatgcaaataatcaaggtggtgtgcagtttgatgctggcacaacaattactcgtgatgagcttgattttgctaaatttattcgtagattacagcataaattcgaagagattatgcttgatccacttcgcactaatctaattcttaaaaaagttttgtctaaagatgagtgggaagacgaaataaataatattaagattgtgttccataaagattcatatttcaccgagttgaaagatgctgaagttatggagcgtagaatcaatatgctcacaatggctgaaccgtttatcggcaagtatatttctcataagacagcaatgaaagatttccttcagatgtcagatgaagaaattgaacaagaagccaagcaaattgaattagagtctaaagaggctcgcttccaagaccaagaaaatgaagaggatttctaatggaaaattatatttccgcaattgaatccagagacctcgtagcagccaaaaaagcttttggtgcaattatggctgaacggacatctggtttaattgaagagcgcaaaaaatttatcgcagcgtctgtcatgattgagggtgaagagcccgttgacgatgaagatgaagacgacgaagatgaagataagtctgagaaagacgacgacgaagaggacgagtaatgcttatactgcctgaaaatcatgaattagttatcgacgctgtcgaagcttttcttcctgaagcacaggcacgttttgataagttgtccgcagcgctttctaaagatgatataaataaaattgtagagaacatggttacttctgagcctgatttagcaattgctttaggttcaattaacgaatctctacaattaaatgaatttatcgttaagcacgttgattctaaaggtactattacccgtaccaaagatcgtaaaacacgtgagcgtaacgcgtttcaaacaaccggactttctaaagctaaacgccgccaaatcgcgcgtaaagcagtaaaatcaaaacgtgctaatccatcggctcaaactcgtggattacgtaaacgtaagaaagcacttaaacgccgtcaggctctggggctaagttaatggaaaacctcaatgaacaacttttaattgagcattggggtcaaccgggcgatgtaattgatggtaaacccatgctggaatctattatcgttgaaggcgaaaatgaatctggcttaaaacctggtctgtatatcgaaggtgtttttatgcaggcagaagtagtaaaccgtaataaacgtctttatccaaaacgcattcttgagactgcggtaagccgttatattaaggaacaggttgctactcgtcaggctctaggagaattaaaccatccacctcgtgcaaatgttgacccgatgcaagccgcaatcattattgaagatatgtggtggaaaggcaacgatgtttatgggcgagcaagaatcatcgaaggagaccacggtccaggtgataaattagccgctaacattcgtgctggttggattcctggtgtatcaagtcgtggacttggttctttgaaagactcaggaaaaggatataacatcgtacaagaaggctttcgcctgactgttggtgtagacgcagtttggggtcctagtgctccggatgcatgggtacaaccgaaacaaatttcggaaaatacctcggcacaagttgccaatagtgctgatgatgcttttatggctctcgcagataagttaaaagcgttataaataattatgtaacttaacacaggacatcaaaaatgcttaaagaacttttaatgaccgaagctaaaactatcgatgcttccgtcgctcttgacagtattttcgaatcagttcagctttctccggaagctaaagctaacttcagcactgtattcgaagcaacagtcaaaaaacacgccgtagctctggcagaatctcatattgaaaaaattgctgagaaagcagaagaaaaagttgaagaagaaaaagaaaaagctaaagaagaagctcgcgaagagctgaaagaagctgcttctaaatactttgaccatatcgctgccgaatggatggcggaaaatcagctggcggttgaccgcggtattaaggctgaactgtttgaatccatgtttagcggtatgaaagaactgtttgttgagcacaatgttgtaattcctgaagaatcagtagacgtagtcgctgaaatggaagaagaacttgctgagcaaaaagaagaaactgctcgtttatttgaagaagtttctaagcgtgatgcttatatcaattacgcccaacgcgagtatgctattcaagaagcaacccgtgaattgactgatactcaaaaagagaaagtagtttctctgacagagggtatggattattctgactcgttttcaactaagctgaaagctattgttgaaatggtgcagggttctgtagagcagtctgtaacggaatctgccgatataaatactatcgacaaagaagcagacggtttaaacttcacaactgaagcagtcgaagaaactcctgcgactaaaaccccatccgttatggatgcttatgtagcccaagcggctcgtctttcttaatttaaaaggttatacaacacatgaaaaagaataaacttatcgaaaaatggcagccgctgcttgagaacgaagctctgccgaaaattgttggcgctagcaaaaaagctctgatcgctaagatttttgaaaaccaggaagctgatattaatcaggctcctgaataccgcgatgaaaaaatcgctgaagcatttggttctttcctgtctgaagcagaaattggcggtgaccacggttatgatgcacagaacatcgcagctggtcagacctctggtgctgtaacccagattggaccggcagttatgggtatggttcgtcgtgctatccctaacctgattgctttcgatatctgtggtgtacagccgatgtctaacccaaccggtcaggtattcgctctccgcgctgtttacggcaaagacccgctggctgctggtgctaaagaagctttccatccgatgtacgctccggatgcaatgttctctggtcagggtgcaaccgagaaatttgaagcagttaaagctggtggtgctctgactgttggtgatatcgttgttcacgatttcgcacagaccggtcgtgctcatctgcaggttgttgaagatttcactgtagacgctggtgctaccgatgctgctaaactggacgctgcagttactgctgctctggaagctggtaaagttgtagaaatcgccgaaggtatggctacttctgttgctgaactgcaagaagcctttaacggttctaaagataacccgtggaatgaaatgggcttccgtatcgataaacaaactatcgaagcgaaatctcgtcagctgaaagcacagtattccatcgaactggctcaggacctccgtgctgttcatggtatggacgctgatgctgaactgagttcaatcctggctaccgaaattatgctggaaatcaaccgtgaagttgttgactggattaactactccgctcaggttggtaaatctggtatgacccagactgttggttctaaagccggtgtattcgacttccaagacccgattgatatccgcggtgctcgttgggcaggtgaaagctttaaagctctgctgttccagattgacaaagaatccgctgaaatcgctcgtcagaccggtcgcggtgaaggtaacttcattatcgcttcccgtaacgtagttaacgtactggcagctgttgataccaacgtatctccggcagctcagggtctgggccgtggttataacaccgacaccactaaagcagtatttgctggtgttctgggtggtcgctaccgtgtatacatcgaccagtatgctcgtcaggattacttcaccatcggttataaaggtgctaacgaaatggatgctggtatctactatgctccgtatgttgcactgaccccgctgcgtggttccgatccgaagaacttccaaccggtcatggggttcaaaacccgttacggtatcggtattaacccgttcgccgattctgctgctcaacagccgaaaggtcgtattacctctggtatgccttctatcgtcaactctgttggtaagaatgcttacttccgtcgtgtatgggttaaaggtatctaataccaataagggagccttcgggctccctttagttgttttaatggatataaataaacttataaatccacagaggaaagcgcaatggctaaaatcaacgaacttctgcgcgagtcaactacaacgagtagcaacttaattggtcgccctaatctcgttgcattaacgcgcgcaaccactaaattaatctatactgacctcgttgctacacagcgtactaaacagcctgtagcagcactgtatggtattaaatatcttaaccccaatggtgacctgacgtttaatacaggtgcaacctatgcaggtcaaatcggtgccccggaacgtgagtcaattgaagaactcactatggcgaataaagattcttttaataaagatgacatgtttaagtaccagaacgtagtctttaaagtgcttaaagacgggccgtttactggtacagctgaaaccgacgaatttggaattgtatctgaagcagtagcagctaataatattcgtatggtgtcagatgctgcagtcactgaaaaattcgaaggacctgattcagacccaatcaccgaagccagttttaaaattgataaatggcaaacagctgttaaatcgcgtaagcttaaaacggatttaactgtagaattagctcaagacttagaagctaacgggttcgatgctccagagcttattgatgatttacttgctactgaaatggcagaagacattaataaagacatcctgcaatcattgattacggtttcttctcggtttaaagtaactggtgtatccgataaaggtgtattagatttaactaagcaggattctgctccggaacaaggtcgtactctgtatcgtttcatttgtgaaatgaattcagcagttcaacgtaatacttcttattctggtacctatgcagtagcatctactcgttgcgcagcggtactggcagcttctggttggttaatgcagaagaacgatgggactattccagaaaacgcatatggcattctgaataacggccttccactgtattgtgatactaacagtccgattgattacgttattgttggtgttaaggcagaatttggtgggaaggaaactgtaggttcattattctatgcgccgtataccgaaggtcttgatttagacgaccctgagcatgttggtgcatttaaagttattgttgacccagctagcttgcagccttctgtagctttactggttcgttacgcgctgtcggttaacccatatactgtaggattggacgaggacgaagctcgtgtgattaatgctgcggatatggataagatggcaggaagaagtcagatgtctgttatgctcggtgttaagttacctaagctgattgcggactaatttatgggagccttcgggctcccctttttttgctataaactaaatatgtcaaacctcggggagtattcctcctcgagggatttaaacactttcttatcatatagattaacacattctatcccgtgcctgcgagctatatcaacagctactctcgtccctccagatacactcccgcatcttttctcaggcgcccaatataataccttatctacaggctcagtgcattctaagcccaatacctgcatagaattccgtgcaaataatgtctgcactattttcgagcattcgtcccagtacgacgtaacttctctcgccttaatgatgcttttgattttggcttcgtttgataattcagaccatacaacaacacctgtaccaggaacatggccacaaaagccagaataaggaataatcctacaagaatttgacctatcgtatttcgccaaccacgcttcatctgaacccggagctccacctgaatatgaaaaatgcccctcttccgagaggcgttgacctattgtagtcattagactcagaactctgcgtggcgcttctcttgaaccaatcagcgccagcctcattattctaaaacctcatgccatttactacgaatagtgttttgaattaaagtagtgatttctttcttaacagcagaagggttatcagcgaatagcatgtcatgaccttcacgagctgcttcgttaatgatatctttcatagtcagtcccataacacgaccgaaatctttagcagttacagtaccaatatgagacagaacgttacttacacggttccaggttacatactcagaaaagatttccagaacacgcttatcattctcggtgagttcaaccttcgctttaataggcttatcggatttagccttctcgctgaacttagagttcttacacttaatagcaacacgagtaccattattgaagaacttaggatgaaccggcttaagaacatagccttcagctacgccagtttcagaagaagcctgtgggccgaacacgtgtttatttgcatgttcaaggtcagtcgtgtcaacaagctcattatagtaattgacaatagatttaaagtcattcacatactgagatagctcggcaaatgaacctcgaccaagaagtggagccaatttaagaccaagaccagtagcaaacgattctactacataatcgtcccaataaactttttcgttaccggaatccgacaggatatcaaacacgtagaaatctttctcaccataatctacgcccttctgaatgccaccgccagcaaattcgccgaagatttgaacagatactaaatccatggcgttcagcatgttctgcatcttaacgaaagaatccttatatttcttcatgataatatcatgaccaaagaaactttcactttctaaaataggtccagtacgcttagccggaacgatttcggtaggagtaataatcacactgaagttagtgccatgaatcttctcacgagccacccactcaacagtatgcatatcaaaaccagcaccgcgaatcttctcgatgaacttaccgttgtaatgattctcaagactagaatattttgcaaacattataatttccttagaatgtgattttcataaagtcagtatcaccgttacgctgggaactggtataatttgttacaaatccttcatcatgcaaataattaagaacacttgtaatgtgtttcttaactagactacttggatacataattagctcacgcttacccgctaaagcggttttctcaatctgagttaatacttcttcttttgctgctgataattcttctgtggctacgttaatagcagtattagccattctatcggcaaggttcataatttttctctcaataaataatataaaaccaggagtccatctattttggacaagggtaatggtatcagaggatttcccctgagcccattataccacatcgatttttaaagcaattaatatccgcttggaacaaagcgatacattaatttgtcatgtttatttcgcatgatttcaaactggtttttaggtccaacttctaatactaacggaacatttacatccattagcatccaatcaatttttccataccgttctttaatcaaatctgagattttgcgtgcgccatttttataataagtgttatcgaatattcgagtcatcatattatcaacaaatcttgatgcagaacgccaataattaatattgctagccgcaggagcaaacttgcgctctaggaacatctcaaatttctcttctacctttttatctactttagacattataaagtcctcatgtgtttaacaagtttcttatgacgagattttataccaacgtttgttaagcgtttccgataaacgactttttctttttgcttaaaccgttcgtgtgctttctcaacagagacccacagcttagcggcttcggctggagtgatatataacgcccttgcaatttcttgaaaatcctttccgctttcatgcatcaagtgagcttgtaatgctttcataataacctcatctatgtgacgaggacataataaaccaatccatgaatagcaaaaagggagcccgaaggctcccgaatattacggatagataatacctgcttccagcgcagtacgatgaacaatgtatccatttctagattcttgtacatcgacttctggataatcatctagcattttagctagagtataccgatgcaggtaataatcgctatcagggtcgtcgagtttccaatctttgccctcaacagtcattcgctggatttcatccattacccaccatccacaccagatataggctgttccacggaacggtagaggatgaatatacggaagttctccgtctggctcaggggctacctttttagtaaaaacaacctcgacacctttagtagcagtagccgggttgtaatctgctgcagaaaccgtgacttcgcaatttaaagtataattagcctctgccgattcagttacggtaattgttttagcagtctgaccatcaataacgtcagcaccacgtttccaaacataagcaatgcttgctcctgctggtgctccagtaacatcagccgtgactacttgggattgaccaatttctttagaaacagaagttgggctcaaagttaaagtaatagcaggcatagttttattctgaacggtcagagtggtttctgcctcagcagtttcaggatcgccttcagccggagtaacagtagcaactactttaatagttttactgcctgcaggacccgcagcaacataattcatggctgcggtaacagaagattgttttacgccgtttacggtccacacaaatgattctgtgcctgcagccgcggctccagaagttgttgcagtaaaattggttgttgctccaatgactgccgaagcagccaaaggagcaatagatacgctataagccataggtgttccttattttaaagttacaaatgaagaattacgtgtttcacgaatcataacagacccgtttcttttgatgtaatagattaaactaaacagtgtctggtgtgctgatgggtgttcaaacgacgttggccgagatttccaatctgggttatctttaatccattggtaaatccaccacggaagggtgatatatcctgggttcttacctagcaactgcatgtttggactaaagttttcaggaagctcaatgatttcgtccgttttaataattttaactactttgtccattgctttggagaattcttcagggtccgtagtactaattgggatgtttgtaagttttccttcatcatcgatatggataatgctatctccaataggagcttcagcataaaatcctttatcattgatagaaggtgtttttacttcaaaccctgggtcatttaccttaggggtttctttatagaaacctgggtcaatatcatgaattttaacacttgcacttactggagcatcaaacagtagttttgcttcatcagacgcttcatcattgaaaagtgcttttccttcaatttcatcatccgcttggattaaatcggcaattgatagaccatcgttgtcttctggcataggctcatcggccaatttagccagttctttttccaaatcagcaaccatattgtcaaatgagcgggtcttcttcagtttaataccgaaggttttggcatattcgtcgagcttgtctttagcttcttttttgtcgagtgcctgaatttctttaatatagtctttatctagcattgggtgtgcctcatgtaatgtataaatatgattgtatttataaactgaggatagtacagtgcacgacatccaagtcaaatttaaagattttagtcatgttcatattgagtgtgatgactcaattttctatgaactcagagactattttagcttcgaagccgatggatacagattcaacccgaaatatcgttatgggcattgggatggacgaattcgtctgctagattataatcgtctcttaccgtttggtcttgttggccaaattagaaaattcgctgaccaattcggatataaagtttatttcgatccagctatattcgagcaagaaactctttcacgggaggattttgacacgtggttagcatctaaagaaatctattcaggattaactaagattgaaccccattggtatcagaaagatgctgtatatgaaggactagttaataggcgtagaattcttaatcttccaacgtctgccggtaagtctcttattcaggcattacttgctcgttattatgtagaaaattacgaaggcaaaattcttatcatcgttcctaccacagcgttagttgaccagatgattgatgatttttgtgattatcgtttatttcctcgcaatgctatgctgggtattcgaggtggtactgctcgtgattcgaatgcattagtttatgtatctacctggcagaccgctgttaagcagcctaaagaatggttttctcaattcggcatgatgatgaatgatgaatgccatcttgcaacgggtaagtcaatttcaacaatcattgcgggtctcaccaattgcatgtttaagtacggactgtctggttctcttaaagacggcaaagctaatatcatgcaatatgttggcatgtttggtgaaatcttccgtccggtatcaacttctaagttaatggaagacggacaagtaactgagcttaaaattaatacaatcttcttaagatatccagatgcagccgcaaatgctttaaaaggaaaaacgtatcaagaagaaattaaattcatcaccaatgttaagaaaagaaaccgttgggttgctaatctagctgctaagctagcatcgcgtgatgaaaacgcttttgtgatgtttaaacatgtagctcacggtaaagagctattcgagatgattaaagctactggtcatgagcaagtttattacgtatcaggtgaagttaatactgaaacacgtaatgctttaaaggctatggcagaaaacggaaagggaattattatcgtcgcaagttacggtgtattttctacaggtatttctgttaaaaacttgcatcatgtaattttagcccatccagttaaatcgaagattatcgtactccaaactattggtcgtgttcttcgtaaacacaaagataaatctttagctactgtctgggatatcatcgacgacctcggtgtaaagccgaaatccgccaatgctaaaaagaaatacacgcatttgaactattgcttaaaacatgcattagagcgtattcaacgatatgctgatgaaaaatttaactacgtaatgaaaacggtaaatctatgattaaatttgaagatatttatgaagccacaattcgtgaggctactatcgataacttcatgagtaaaattaatgcttgccagaccttagatggtctggaagaactcgagaagtattacgataagcgctctaaagaaactactcttgctgattctgatgacatcattgtgcgggatgctttggcggggcgtagacaggctcttgaagccgattctgaagatgaagatgacgaagacttctaatacaaaaaagccccaaccgaaaggaaggggcaaagccaattggctacatcaacactagactaaattaaaagctgcgtttcttgtaattgctcttctgtgtcttcagtgacaggcaattcaatcgcataattatagcaagctccgggatgaaccgggcctttgtctgtgtggacaaccaatgcttcatcgattggtcctttacagacgacacataccgtattcgacatgattgtctccttagtttacaggtttatttattacgcgccagcttcaaactgacgaaggtcaataatgtgcttaatgctaaaacctcgtgacttgatagcatccattgcatcactacagaactccaaaagaattccccaatattgcaatttagtatctacacccaagatttctttatcggcgcttaaaacagttttcatttctgatttttcatatacatccatgcatacttcaccaccaacctcgccacggccagtgtaataatccaatcgtgctttaagattttgctttttgagggcatctaatcttaacatctcttttcgacaagtcgagtgcttacgcacccatttaccatacagaacggggttattagccgcttcatactgtagtttagtctggtcgataatcaaatcattatccaattcatcctgtaattcttctaatctcattctatctccactctactgtttcttggaaggactagtcccattatactctactgctagagttagcattactacgcatctgtatgcgtatacgttctagcgtatcagggtcgtctactatagaaaactgcacggtgacaattatagcgttatcgtcatataacggaagcacatcaactgatagacgattaatcctaggctcataattacgcacggcagagactatattacgctttatcgtatcaccagttaacggagtcatgttttcaaataattcgtttgtgatatcacaaccaaacgctgggtcaaatggccgagacccctttcttgtggttattattccaagaaggctatttttaactgatcgagctcctactgtttttgacacatcggtatcccaagcaagtcgcatctctgggtcaaggtcagaatatagtttatcaatattgctcatgacataatcttaaagaattctttaagccccttaattacatgaatgtgagaaattccgcattcacaagtaatgggaactgccaattgaacctgtggcttcaatagcatatttttgatgttaactacatcttcggttgtaatagcagaatataaatcatcgatttctgcatcgtttaaatcattaaagtaaatctgctcatttccaaccacgatataatctatgcattttgatatcatcattggaatgtcggaatcgtcaaaaagattaggatacttaaactttatcttgaatccctttaagtcataccagaggtcttctggaggatcgatttgcgcatgtgtataatttaatggcacaggaattttacgcccacaggtgcaattccaggtcacctcatgattaacctcgcctatactatgcgcccaaagtataactataagtaattccgattcttgtttgtttaacccagtagcattagtacattctctgagcaatgctttaacacattcatcgattgtaccgtttttcttcgctgcaattaaattagcgtattcttctagtgtaaaagctcggcactggatattcttgccatttattcttgtttcaaatttatatgtgatgttcatatccactcctcttattcaattatttataaatagtataaagaggattaccttatggccaacatagttagatgcgaattaccagatggtgtccaacgttttaagccatttaccgtagaagattatagagaccttttattggttagaaacgacatgaacaccaagtctgaagaagaccaaaaacagcttatagcagaattaatggatgattattttcatgaccatcctgtcgagtatcgtccttatatatttcttaaagtatttttgtcaagtattggtaaaactaaaataccagtcagaatgaagtgcccaaaatgcggaaaatataagcagtatctttttaatcttaatcagcctccgttgacaaatccgaaagtagaggttgcaggattaacgcttaagttcaaaaaacctatagaaataattgatgatacaggtaaaatgattttagacaacattatatctgtgaaggattcatctggggaataccagtggaatgaattaagcgatagtaataaattgacagttatcgatgctatagatgttgaaaccttggaaaagattttatcgcagatgaagccgtttaactttgagctaaagacgtcatgctgtgataccacgacagtattaaaatatgataacattgttgatatctttaagttattgctacatcctgacgagattttcacattttaccaaattaaccatagattggtttctcaaggtaaatacgatttgaattctataatgaaaatgctgcctattgagcgtggcataaccttatcgcttattgaaaaggaccttaaatcatgacaacacaaagattaggatatcctaatataagcataaaattatattctggatatgatgcatggctagctaatagatttgttgaattagctgctacatttattacattaacaatgagggattcattacgcgggactaatgaaggattgcttcaattttatgacgcaaaaaacatgcacacgcgtatgaacggtgatgaactagttcaaatatctgttgcaaacagtaacacatcgagaacacaaacccgaatttatgggattaaacactttacggttggtgttgatgataaaggcgatagcattatcacccttcagcttggaacgctgcatgacataatgaatcttaagttcagtagagcgttttttagttctgcgtatgaaactataaaggaaatgataggcgcgatgtatgttgaccaaccattgattgctcctcctatcaacggaattaacgcttacgtcccacgggttccctggactagtaccctcaaagattacttacgatatgttagaaacgtaggcatttctactgataacgaccaatttatttttgcctgggaagatatcactgggattaacatgatggattatgaatcaatgatatcccaggatccaaatgtattcatgttcggggctcctcaaacaataggtcagtttgctgcaggattaaaatatccattagcatgggattttgaatggcttgttaaatcaaatagatataatagaaatcccatgaaaaatgcaacgttttatgcacactcatttgttgataaagatgttacccgaattattaatggagaaggccaaaacagcgtattcattaatagatcaggcggatattctgacatgatttttaggaatggctatgaagaagccttacgcatttctacgatggctcaatatgacgggtatgctcaaactaagtgttacggtaattttgaactaactccaggaatgaaaatcaactttgttgatttaaaggaccagttcagaactgacttttatatagatgaagttatccatgaaatatcaaataacacatctataactaacttatatatgttcacaaacggctctgcccttgaacctgtagatttgattaaggtgaaaaatgaacttaaacgtgattcttcctattaagaaaatagtaataaatgaaaagacgatatcaattccaaaactggggttaaagcaccataatctgatgaaagatgttaagggtccagatgaaaacatgaatcttcttttggattcaatttgtccaggattaacagcagccgaatctgatattgttgtattacatttattagcatttaacaacagaataaaagaaactgttgttaaagatgattttacctacgatttgaataaggtttacatttgccagcgattaactcaacggttagatggtaaagaattcaaattcagagctcctcctcgttattccaaactaggttcagtagattcaattttgagcgaatttcttgaatcagtagatggaaaaccaatggatataaactttatgaagcttccagcttttgtaacaaagtgggctgatgacttagtaaacactatagccattgatggacctgaaggaccaatcaaaggcatgcttaacgtaatggaaatatttgaatgactaagaaatcagaaatgaattcaatgcgtagaagagttattgctgactcggctccacagaaaaaggctgagtctcaagctgatgctcagattaatacgctagaagatattggtcgtcgcttagacgaccaacaagcatctactgatttgatttcggatgtaatagaaactaaatcaaacgaaattatcaaatcagtagaagatgtttcagctggtgttgaattaactgccgaagcttcagaacgcacaacagatgctgtctcgaaattaaatgatactgcatcattaattaatgataaactcacgaagcttgctgacttgttatctaaaaagcatgatgttcagcaagatgtccaaaagactggcactggaacatcattagaaacgataacagaacaagtcccggatgctcctactcagcagccattggaggaattacttgaaaggcttattcctcctcaggatgacagaagacctgatgcagatttctttcctaacacagaagagcaagaggaaagaaaagaacctaacaaagaaactgaggacaagaataaaaagtttcttgacttgaaatttggagaattaattaaaagcgttaaatctggttttggaaaaaccatttcattaacagataaaattagcagtatgctgtttagttatactgttagcgctttggcccaaatggcgaaaactgccgccatggttttgggtgtgataatgcttatagatttaattaaagttcattttaattattggactaaactgttcgaaaagaactttgttgaatttaacaagcaagccaaagaatggggtccgctattaactgcaataagcgagatgtcgaatgaaatagtaaaatcattcgtcaaaggagattggggtggattagcaaaagccattggctcgggtttggttgatgtaattgataagctcggagaaaccattatgctcggaatgagtaagcttcttgctggaatgttacgcgcattaggattcaatgattcggccgataacattgaaggcgctgctttagacagatttcaaactgttactggggcagaactcgatgaagaagatgctaaaatgagagcaaaatatgttgaccgtcaagaaagagaatatgacgaacaacctgaatggaaaagaaagctttctgctaagttccaaaaattcaccggtcagattgatgacgatgaatataacaaactgctgagcggagagaaaaagcagtcagcgtatgcagacttgccagaagacgaacgcctcaaaatcatcacagctcgtaataatgctgaggcagaactcaagcgtacaaaagcatatgttgaaaaaactgacgcatctgattccactcgattagactctgctaaggatgcagtacaaagcacaaccactagatataaagaactagagaagttatccccagaggttgcaaaagatttaaaggttgaattagaccaattgcaaaagcttcttgattctaaaatatcagaacctgctccaactgccgaagctatacctgcagcagaacaacctgaggttaaacagtctgcttctattaaagccgccgcggatagtcgtgaaactgctcgtacacgtgaatctaatacacagtcacaacctatccaggttaatactgctgtaaataagaatagcacatacgtttatagaacgcctccacagacttcaacagctgctcctggaatgcaaggcgctatgaaaacctcttaaggaaaaacaatgatttttgaagaactggccgatggccttgaaaacatcaaaaaatcaggaactcgaatttcccaaggtaaatctaaactgacgaatgcgccaaccactaaggtggcgcagttcccagctgaacgttcagctgggaatgattccgcccaagatatgagagtacatgacttatatcgcaacgggttattattcacagcatatgattttaaaggaagaactactcctgatttgcgttcatttagacgagatgtaatgttatcgtctgtattcgattcaccaatgtcagcattggctaattcatcaagctctaccactagtactgcaccagtagctaatattctattaccgcggtctaagtcagacgttgattcagttagccataaatttaatgatgttggggattctcttgttacgcgcggcggtactgctactggcgtattaagcaacgtggcttctactgcggtgtttgggtcgatagaatctttaacacagggattaatggccgataatggtgagcaaatttataacactgcccgtagtatgtatgccgggcctgataatagaacgaaagtgtttacttgggatttaactcctaggtctgcagatgaccttatacaaattattcgcatctatgaaatttttaactactattcttacggtgtgactggaaattcatcatacgcgaaagaagttaaagctgctattgatgaatggtataaaggaactcttaaatccgcagctccagatggggctaaagtagaaaacacagtgtttgagcaaataacatcgtttttaagtaatgttattgtagtttctaacccaactatttggactgttcgtaattttggatattctacatcaatggatggtagagaggatatatttggtccatgccaaattcagagtatccgttttgataaaacgccgaacggacatttcaatggtttagcaattgctcctaaccttccaagcacatttacgcttgaaattactatgcgtgaaatacttactcttaatagaggaaacgtttatatcggaggtattgaataatgtttactctcgaagaatttaagagtcaagctgctgatatcgatttccagagaactaacatgttctctgttgtattcgctactgtaccctctagtaaaacccaggctcttctaaacgactttggtggagagctgtataataatatgggtttagatggaaattggcttggattgacaccaggtgaattcaatcagggtataacaactatagtgacacaaggaactcgacaagttgttcgtaaatcaggtgtgaatacatttatgattggcgcaatgactcaacgtgtggtgcagtcattattaggagaatttacggtaggtacttatctgcttgatttctttaacatggcatttccgacagcaggattgatggtttattctgctaaaataccagagaatagactgtcatatgaaatggataagttccataacgctcctaatataaaaatcactggaagagatatggagccgttggttctttcatttaggatggacccagaagcaagcaactatagagcaatgcaagattgggtaaatgctgttgaagacccagtgactggtctgcgaggattgccacaagacgtagaatgtgatatccaagttaaccttcatgctagaaatggattaccacatactgtatgcctgttctcaggggctatgcctgtagcatgtggagctcctgaatttacatatgatggagaaaatactatagcagtgtttgatgtcacgtttgcttatcgcagcatgcaaacaggttcagtcggaaaacaagccgcaatggactggttagaagataaaactattcagaaaattgagacgattaatccaaatcagggcttgagtgcgtctgcttcaagattgtctcgtttaggcggggctggtggtggaatttctaatatcactactacgacaagtagaataatttaggggccgtaaggcccctttgttttatacaatgcagccaataaaccctggctcagtgcgaagaagtttcatttctttagtagtccaaactactttaacaggaatgataccttctgctttaccgtttagaaccgcttcgacaaacgatggttcagttggcttacggaagatatcttgaataagaaccgtcggagtaccttcgttaaacccttcaagcatgataagaacttcttcgttgaacttctctgcgtctttaacatcagcagaccattcaataccattaaagcggaatacgtgtttcatatcaatttcctcattggtttgtgtaagtctatagtatcacgtccttgtgataagtaaacaactttatgcaagtttttctgggataccatccaggttgatagcaccagccagtagctccatggtacgtgtgtagctaaccttatctgtagaacggtctggagagaaataaatctcgtttaaaaagcctttgaacttgctttcttcaagaggttccactttgccttgttccatcaagatgtcaccatcatagagatgaaccgattcatcgatttgctctggcggaactaccgtcatttctaccatgaatgtcttgttattcgctacaccaactccatttctaaaaggagttccccatactttgttgactttcattgccaacccgcgaggaagaataacttcagcctcatcactaaaacttgataagacacccgggataactaccttaactttatcagccccatgaataatgaacccaaacttaaactcatcagcataggcaacttcctcgcctctatcaactctttccaagttgtctgttccaataacagaagatactgcatcgatagttgtttctttgttttctaaatcagaactaggtgcgtctggcattaatgaatcaccagcatttgaataagcaccaaagataattggacttaacgaagtagaaacatagttctggaaataaaacattttagactcaatgttatctttaaagtcttcatattttcctcgctgaccacgatacaaaagagtgcctggttcaagacgcaagcctttttcaaatgcagaatcgagcggacgaattttcttgtcaataattggatcgcctaagctttccataccaataagataattattaacaaatgaataaccagaaccgcagtaatggtgtattgcatctctttcttcttcgcttaaacgagattgcatttcacggttatattcaattgctttggatatagaatcgccaacaattgacacataagcggatatcatataattgacaagattttggtattgacgtaaagctccgaaatcgtcagctggaggcatatcaaatccacgagtagctacttcaacgattttacgcattgtttccatagatgccggatttttagcttgagcaataacgtcagcaacgtctgaaattcgttgctcagcgattttcattttgtctgaacccgaaggaatgaaaaccttccagtcgtcatgcattctcgacatttggcctacaaataatctctcaactgcatcgccaaaattacttccatatccgccacgaacacgatagtgcttgatatcatcaacataaaaaggaattgatttttctaatccggctttgatatctttttggaggtctaccgtatcgccttctgcgtttagtactggagtgttagtagttaattcgtaccagcgttcacgtttattttctggccaatcttcatcaacatatgaaacaaatttgccgtactgtgctcggattaaatcttttcgagacactttcattttactcattacagcgagttcagatttcttgtcttctttttcgccaatggaattagccaatgcttcggctttggtaacgttttcgccggtttctttagacacataaacttcacctactttggaatctactttggtataaagttcttctgaaatttcaggaattccttcaatctcttcaagcttcttacctttgcgaaccataatggaataagcatacttacctttgtagtaagccatatctttcattagattgaaacgaccgccggtgcgagtagtaatcaaccgagcaagaatgcgttgaatggctttatcttgtccttgcattttcttcggattaaagcggaacattaccgcatcagctttaatttgcttaactactttgttgacggtctcaaaaatggtattgatagcaccaatcgggtcttggcctaaaccacctttaagcgcaccgatgttacctttttccgacacagagaacacgtagacctggatgaatttatcacccatcttgatgttcttaactgcatcaccttgacctgacccttgtactaaccgaatcattaaattgttattacccggcaccttaatcaaaaagacctgtggtaccttaagttttggcttaacgttctcgacaggatagattttactattctcttcatcgaaaacttcatttaaaagttccatgacatatcctcgtttgtttattctatttatacgaaaaaaggcccgaaggccttaattaattattgttactgtacgccaaacctgtaatccatttactgattcatacgcttcgatgttttctttgaagtttcttaatgtgttaatgttattaaactcaagaacttctgtgtgaacagaaatacccccacgtccgtcagaagatttagcaattacttcatatagaactttcattttattcctgttgcctctgtaaagttaacgccaaatgcggcttcgaatgtattagccacttctttatcatatctgcgctgtttaatgataggcaagaacaatcctaccgtaccatcatcacggccttcagcagttacccaaccattacattcaagttcccagatagttcctggaagagaatctctaattttccatagatgagtacggtcaagctcgtgcagttcttcgggcttatctttaagacctgacccagcgttaacacgaatacgaccacattctgatacgaacattaacccacccattttaccgggttgtttcctatgctcatatgaaccaacacacttcaaatcgacagtgataacctctttaaatttaacgaggttcttagaacgcttatcttcccaataagcaccgatatttttaaggatgataccttcgagaccttggtctacgtatgttttgtagatggctctagcttcatggatgttatgtacgacatggttttcaattagaataaccttgtcatagcctttgctcatcatttccagtgcacggaagcgtacatcataagcaaatccaggaactttaccttcggaatatactacatcaagcggaacataatcccaaacttggaatctcataccttccgcttcttcagcagagattgttcctttaatggccttattagccaatccgtttgattccgtgcgagccgtctgttggaattccttagctttacttaactcaggaagctcaggctctttaaacatgtcaaacaggtcgtttgtttcttctttcacttcgacatgatacaccaactcgccatcaatcatcacaccattaggatggcgttcgcgggcttctttggtcatctcgataagttggcgcttgagtttatctagacctaggtattcattaccagaacgagtaagaagagttacatcatctaaatcatctccgcggatttcagcgaagcatcgggctccatcagctttaagttgtgcgaatgcagggaacttaatatatgacagcgctttctcagaataggctgacgccaacatctgtggcatctcaggaattaatttcttccataccttattagcaatagaacccgaagcgccgcaacgcatatccttaagaaggacacggactagtacactagcatcaccctcgttcatcttagagagcaaatctactagcccctggattgccatattaccagtaagtactcgtgctgccagaatgtcttggaggtaatctagaccatctgaaaacgtctttgaaggaacatttggatatttaacgggagtatattctggaactttcttaataaaaaatttaaatcgcccggaatacgccagcagataagctcgctttaaatcaacgttatctttattgtcaatgagaatttgggttttggctttagaacccttagcatcttcaattgctttgatgatatcaaaaatcattattcacctaattcttttgaaagttcgcttacactacgatgataagttaatccatcaatataaacaaacccgttattgatgcattcattccaaatcgggcacgactttgcttcacgccaaattggattccaacgataaaactgattaacatgaccataatcacatgataaccagcgtttacctaccttagtatgaactacaaacatatttcctcctagggtatggctattataccatacccagtgtgttagcaattaatttgatggttatcacatgtaatacgaccgttattccaccagtcgtttccaggaggaacatgtggaccaggtctaaacggaatgataggttgtttccaccaatctcctggaacttgttgtggaggccaattaaaaggatgttgctctttacgaatttggtctttgatagcttcttcccacaatccagaaagagacttctgcggtttcttaacggatttcagagattccaggcaagttacaatttgatgccaatcttcaaccataattccaggagcagtcactgagccttctcgctcaccacgaggcatatagaacacacgggtttcagtgtcttcaaagactttgctagccgcagcaatatgtttaggcaaatcgtcaacataacacacaatgcgatcgccgtattttactttagccttttccagtaaagcatctttagattcatcataatcgcagaccatgatttctgtaaatgcatctgggaataatgcgttcagattgaaacgacgattaaggttagcatctactgagttgccaagagccgtgatagcgacaaaatcgtatttttctttgagcttattaactgtagctaaagcatcagcatacggagcaagataacgaataaaatcgctgttgttatacttcagaagcagcttaacagccagttcttcttcacaatcaaacagctcagcgggtttaataaatttttcagtagtcatcatatcaaggatatgctctaccggaaggttatatttttgggcaaagtaaggcagaccactttgccacttaacgatgattccatcaacgtcggttgcgattacaggttttgacattcggggaaattcctcaatgcttgtttaaatttggcgacgctatttgcggcaccggtgaaattgaaccagattaaccctggagtgtccgagggttctatatcaattaattctatattataatactcagcagtctttagcatttccctggtgatacgtcgggcaaccatatgaccgaaatgaggattaatagacatcgtcgttagcagcccttaactgagtaattggataaagctcagattccgcatgaattgaacgattgccatcaacccaattaacttcataccacggttcaactgagtaggctttaatggctggagccgtgtcacatacaactccaggaattccatttgctaatcttactgtactgaagatatgatatttcatgcatcaagtctcactgcccattcaggcaattcaaagaaatccggagcatcaatttcatactcaacggtgtgttgtttaacatcagctgacatgatatcaaccattgggtggtttttcaaactgcaagaaaaaataccagctttagatttaggcacggatacaatcatgatgatttcctcaaaatttagttatgaatttttctttcggcattttggcatttgagccatcactgtcagaatacccaattggcatagttgcattaatgaattcaattttagcatttataacattaatgctcagagaatctacgccatcaaccatacgaaattcaggagggcaatacttatcaatgtatgctttcacgccatttttattagcaggtgtaccatcgcgagtatcgctgataatggtttcaacttttttctttcgtgaatcatagaaagctgatacaatcatttcaatttcctcttaaaacggacgaatattaacgtgaaccacagggacagcaaaaggttgcatgattacaacttttgtgtctttagttgcattcaggcgttgtacttttgcaagattaacagcttcttcctttgtcaatccacctttgtaggtatcatttcctttatttgaggtccaaacaccccaatcattgcttccatcatcgtcggtcttcggttcaggttcaggttctttgtagatggtttcttcaaaataatgttgaaattcttgattagtaagaatacaccacatgtgagaaaagcggggttcatctactataactcgttcgcgctctccaccaggcttaatgatttcaaactcaattaatccaatgttttccgcatatttaaaggttctggtaattttaatcggattattaccgatttgctcaaaaacacccttgataagagcgcctggagacaagattggagtctttttaagtttatagaatttacctttttccattatcatttcctcaatagtggggccgaagccccgagttagttaaaacttgatttcgtttgaaacgatatcccagattgcttcacgttgttcttcagttgttttacgaccgaggatgtggcgcagataaattttaacaagcagctgacgatttgtgttccaagacggatgtgaagataaatcacgtttacgaacttcatcatggaatccaactttgatttcagaaccattgaactgaatatccagagtaggaccgttttcaaagctgaagaatacgtagttatcttcccagtacatatcaatttgagctactgtgccattgttgtgttcccaaagcaaagtagtagatacgtcccaagcattgttctgtacgtatttgcggttgaagttagtgaagttcatttttattctccgtagtttgtttatctgtttgggtggtacaggtctatagtaacccagaccacccaagaagtaaacaacttttattcaaaaactacatttatttcttgtttttctgctcgagcagtagaatgcagtttaaaaatctggaacgtatagtctgggtcatgcttgataactttcgttacatatttcttggctttttcaagagtgaacaagtttgaattgtaatcaccacgaacaataccaaattcgctctctttctttccgccgacgatgatgtattgcgcgctgccgtcatcgttaacttctaccattccgcttcggagctcgtacttagtaaacatgatgcaattactaaatcctagcatatccgcgtctatgatttcacctgtactttccagtttaattgatttaacattaccatgttccgttaacgtatgaactgaccatggcatgcattcaactctttcagcaataagcttgttaacgttactactggttgaaagatactcgttctttgcagcttcggtcaaacggtagcttttattcatttcaaaaacttcagacatttttcacctctacagttttaacagtttttacttctgcaaatccgatgcttttaaacagttcatacttggtagtttcggggacgatatcggttagttcaaggatgatttcttttgcttcttttaaagtgaagacgctacgcccatctttaaccactggagtaggtttaacgaacgttgatgggatttcaaaaactgcatagcgatcatcagagctttgattttcaaacgctcctatttgcacaacacgtccttcttctaactcatgagaagaaaataagcatgacagagaccggtcatattcatctcctatggtttttgccgaaatgattttaccggtttcggttttaatcttaacgacccgtcccagcgaatcaagttctaacggcgtccagccttgaactccgacaacggtggcaatgagatagttaattgtgttcttagcgtctttccatctacggtaagtttctggggaaatgcaatatactcggtttttgctgtaattcattttgatatcctcaaagatggggccgaagccccagtcaagattactgtttagtccagttatccatgtttaatttaccgacctttttcatttgctcaattaaagcatcggcacgattacgaccattttcataccaggttacatcttctgagtaaccgtcttcttcatctgtgtaagtttcagaacgaatacgaccaacaactggagtgttcagaacatatacagaacctgtgaaccaattagttagcgtgatatgccagcagaaatcatctgacggtccgtccggtgtcatgcatggaacgatatcaccttgaactttagacaaaatccacattttctcatggacagtctgagctttgtaaccgtcatggtctttagtcttgatagttgcgttcaggttgatggtattcattttattctccgttgtccgtttgggtggtacaggtctatagtaaccttgttgagcctagaagtaaacaacttttttcattctgtggaaaataaaaaagggactcccgaaggagtccctgaacttatgctttcggcttaccaaaacgagaagcatcatcgcgaagaaccgcacgagcccgacgcatgattttctcaaccgtctgattgatacgcttgttcgacccacgcttgtagccagcgcgtttagaggtaccaacaacttcttttactgcagtttttgctttagcttgtttagccattttatcatcttccattttggagaaatacatgggagcacgttcttccgaggttcaacttctttcgacagttctttcggttgtagctcccgcaagcccctaagggtacgtttaaactcttatctgttgcacaccgttagcttaaaggttccgggtctgatttctcagggataagatatacaccgatggatgtataggccttgaggcgtactcccgattggccatcgcctcggggtagcatgcacttgccgtttatttctagctgcactttggtagcaaatcaccggtggtttcggatgttttacgtggggataaccaacaacgtccacatcatacgttacccatgcgtacacatggtgggcgtacaaattacttcagcgttaccacaaagtggcgaacagctttgcgagcagcagaaccaagatgcttagcatacttcagttcatccatcgcttctaaagtatcacgaaattcagcttgagctgggttcagatgtttaaaacctttcagaacttccagtgcttctgcatagatatcgattgaagcaccgtagttttcgtgaccggaattccatgcattacgttggagttccagagctttagtaagttgtttgttcattgaaacattcctcaaatgaggttaaaatttggtggacggtaaccgaggtttagctcgggcatccaccgcttagaattgctcgggtaactaatttccgacgcccaattcatattattatttatatacgcacgccagggacttataatgacaagtcacaaacttctgccggatttctttaggtttcttcacacctgcagctaccaatggatgcggtacatttctaatattaccaacaggcagtggagtcaaatcaccgacttcaacaaaacctttcggtacatcatcaccgatagaatagatttcacacatatccggcagttgtccttgttcttcttttccaagaataataccggaaggagaaacaatttcatcaccttgctgtgcaggttcagacacgagaattacatactcgcctagagctttaattggaagttccatgtgttacctttattgtttgaccatgtagttatattaacatggtcagtttaaagcaaattacttaccgatcatctgcagcagatgctcaactttcataccatttaccgagatcagtttatcaaaggtaaatgagcgccaaccttctttctcggtatcatataccggaagtgaagtagtgctttctgctcgggcagatttagtagtactttctaccaaatcagatggaataatatctttatcacgagtacagcgcagagtacgaatagtgccatcagctttttcaaacacaatctgggattcgcccatgctcagcacagccttcagagtttcacgaatatggatgttttgttcagtagtcagtttcattttgatgtctctttaatagttttgataattacagatttgcgcttggataattcttttaataatcgaactgcttgatcttcaaatttaaatgttgctaatggtttccatttaaaccaacaccggcgttctactgagtatgatataacaacatcaccgcttaggttaagtttattaatttcaacaattctaagtttcattattcaattccacagaattctttaatgttataccaattcaacttatccaaattacgttttggaacattgaacacctcgattccagcagaacgaagaatatcgtcccaaccgggttcgttcttgtcgtatgtttcgcagtatactaattttttaataccagactgagcgatggcttttgcgcaatctggacatggagacagtgtgacatacattgttgctccatcaatactactgccgttcctggcagcaaaaagaatagcattaagctcagcatggatttcattgactttagaccatgcagagtgggctgctcgatgttctttgagcaatccgacctttttgacttggaatccatcttgacgcaatcccgtagatttgtaaggaatttcaccaatccaaccttgttctgccgcatggtcacaacagttcacaccaccagaaggtgaaccgttatagccagtagaaataattcgtccattcttttcaattactgcgccgactttccacgagcagcattttgactcttgagatacgagatacgcaatttgtagtactgtcgacgctttcatttaaatcaccagataagttgtgttatttgttttaaccaattttaactcgtcggtaggagaagcaaaactctctactcgagaagtacgaatgcctgtaccatctggaaacggatggtttcctcgttcaagaacatcggaaaagacatagccataaagaggttggccttccttaacatcaacgttactgtacaaaatagcatcatattcttcgcgtggaattgaccaaacaccttggtcagaaccaataacagcattaattagacgaataccattttggctaatttctgctttaatgccacgagcatgttcaattaaaagagcttctacagcctcacgtaaagtcattagatatgtcctaaaatgttagtcatttcaacttggcctgttccggttaaagccaattgagtgtgttgattgctctttccattattaactgtaatgatataagcatcaacatagttaaaggatgactctcgtcggagagtcactttacttccaggaacccggtttgctacttcctgtgcgaagattttaaccttcgaaataaattcatcatgtgaaaatttagcgtcagacaacataagtcataacctgttgggtttcaaaattagcaataattccaacgataaaccaatcatgttcaccttcgccacaagaaattttaacttcagatgaaccgcctgaccggtcaatagaaaatttaataacttcgccgtttggaataagtgcattcatggcagataaaaactctgcatgcattttggctacttcagatggagtaaactcatctgttaaatgattagcaacaacttgcgtaaatgatacttttactacttcggaatactttggaaacattatactttcctctaaaaatcaccgtgggctacttgccagcattcaacaccaatacgacgccacatttcaactacctgcgccctgtcatctactgcaagtttgacattataacgatcagcaattcggtcccagaagatttcttcttttaccacatcgtctttgcgtgaatcgccttgcttacgttggaagtgttcgcctgtttcgccaacatggtccaacagccatttcttcgtaatgcgttgataaacagtagggtcttctttagtaccagactctctgccggaaacagtaagaattttatatcctttgttacgaagcattttaagaaattcaattaccatttcctttggatggtctttaccgcatttggccaagtcataaggagaacgatgattgttatctgctaacgtgccgtcaaggtcaaagataactgcttttggcagtgattcgtctggaatgtacaaatcatatgggtgcatcttagaatagaagctacgaagcacttcaataggaactgcattcgcgccacgatagaggttacgattaagcaattcagtccaaggaacgtcaaagcgtttaatttcccacttgacaccatcaatttcatatgccaactcttgccacttcttgatagtcgttggattaaggttagtatcagcaatgatgacacctttagtggtttccatctcgagtagagtcttcgccatagaaaactgacatacagatacggacttctcacgaagcttagaatatttgtaatcattacgtttatcaaggccaaagatgccttcacgcaaatcatcacgagacaaaacataccaaccaggattagctgctacgtattcgttagcccaggttgttttaccagagcctggagccccttgtgtcaaaaccaattttttcattatacatccttaagagtgtcaataaaatcatgaagagccttagacttttcaccccaattagcacgatatttttctttaattgcttgcaatggcttattcattgacagtatatcatttttgtcataattttcagccgcgcgtccaaacacgatgcacgctaattcattttcagcaattaaccctttaagtgtttcatactgctctcggttcattataataccatcacttaacacaacgaggttctttaaggtcagaacgataataacatatcattccgttagcatctttagtataacgtaaaatgtcattcatccagatgcgatactcttgcgactcttcaaatggcataccaacccaggctttaccgtcaattacttttacttcccaatgtccttcccatttttgaattgggtctggccactcaggatgcaaaaccgggacatccggtgcactagaagagcatccagcaagtaagctgataatacccatggctaatagacttcgtttcatctggtagcctcctggatatcttctgcaaacttattgaagcttgcattaatctgtttttcaactaacccaggtttagctgcaactacgtttccacgcttagaatctttattcattttagcgttggaagtatcacgcgccgctcgattttcctgatagcctttatatgttgtctgcagattttttatagaaacaccgatattttctatttcttttgcttggcgatcagattcgtcttggacgactttgaggtcagctttaagattttctacccgccaggaaagatatttcaatcctccagcggataatgctaacactccaatcatcaaccaagttgtgtttattttgagcatagtttaaggataacctctacgatatcatcacgggataatcccgaaatgaggatgtgacgatcagaactttccgaaggagaacacttgaagcaagcttctacgtattctgccatttcagaataattcagctcgcgatgcataatgccaagacgatgcttgccataaatcgggtcaacgattacataacatttgcatccgttagcatgaacgtttggctgggtgatgttcttgaacacctctgcaccatacttcgcgagatgattatctaggaaatcaatcatttcatctacggcttcaggcaaagcttcggcacgctgctcgttcacacgattagtgtactctttttgcttcttacgagcagcttccttgcgcgccatgtgcgtccgtaggtcagtgacaaatcccactttcttggtaccattccacacaaaaatcccatcagaatgagtaccatatttgttaacaaccatatctaaagtaattgcttgcatatccatttcaatatcctcatcagttgatataagtctatagtatcacactctgatgaggatgtaaacaactattcttcagaaatttcaatttctttttcgtactcttttggaacatatcctgcccagtacttcaagaacaccctttcgaggtctttaagcagtttatctacatctacagttccttcgtacatgttcatgataacaccaaaaagatgacgctgattaaccgttgctttctgagcagcaatagcgtagtctttacgagcacggcctctgtactcatcataaaatgactggcatagttcaagtgactttccgaggtaatctagataagcttgctcaaacgcagaaattttcttaattgcgtattcatctccagcaaaaagagaacgcaagtcatcagagtttgcagatacaacagacgcaaacaatctttcatttgacgttattgagtctttagtgtgatgaagagccgagtaccattctgttttaaccttaaatcgctgcccagtgtttagaactgcaatgtatccttctacgccttcaagcgcacgaactccttcaacccaggtagtagggtcagaaattccgtaagcattaattaaataaggacgaatcttagcattagcgtacaaatcatcatatttaatatactcaccagttgtgttattacggacgtttaacacaaacagctgtggctcctgatatgctaaaacaacacgattattaggtgaaacaaattccatgtttaccgtataaccatctagcgctagctcaagaataacctgatgaagcgaagaatattcttcactgttaagcaaagctgaagcttgtcttgcctggtcactgtagagagatgtttttgacttaaggtatagatacccatcatcaacataagatgacactagagagccatcagccttatccataatgtattctacatcgctaatatcaattcccatcgtcattgggttttcattcaagttaaagaatttttccattggacgagaagcaattcgaattggagtatcaccatccatttcaaacatgatgccccggcactcaagagcatctggttttaaccactcactgtagcttgcgtagtgatatgaaaacactctgaacttgccatccataggaccagtaaaatctttataaaagaattttgcaacttctgagctttcacacagattcattaaatttttatatagctctaacatttctttaccttatgttgtgtgttccatggaggattgaactttttaataaacatcggttcttccaagtccatagtggatattgacatctcgccaagttcattattaatcaaaagattaaaacactgacgagcatagaactctacttttttgccagccattagtgcttcaaaaatcttggcagatttagccgaatcagaggtttggtctttccgattaatagcagttctataataatttatacgtttacgaagatttttagtcttaccaatgtaaactagttcatcatcaactgcgatggcataaactacattcaacttgtttgctatcaaaattggtttgatggtaaaatctggttctaactcaagttgaacatattttataaaagaaaactcgttagcaatatcattcataataaagaggggccgaagcccctttccttataagtactttttaaatccaattagaacatcatcagtgacatcattgtcaatctgagctaccagataagaacttatctcaacttcctgaggagcagattggactgcatcagagttaagatattcacgaatccaaggaataggatgtcgagttggtgcatcagtaataggacaaggaagaccacaactacgcatgcgagatacagtcagatagtcaatgaagtcatgaagaattttaacgttcagtcccggaagaccaccgttgcggaaaagatggatagcccaatctttttcttggcggttaacttccatgaagattttaattgcttcttgttcacactctttagcaatctcaacccattcttcgccatcagtgccagtttgaagttgacgcagaatgtactgtgtgcccttcaaatgaagttgttcatcacgagcaatgaacttcatgattttagcattaccttccatgatttccatatttttatggaagttgaaggtacatgcaaaactaacatagaaacgaatagcttctaatgcgttaataacatgtaagcaaagataaagagatttcattaaatcacgtttagcttctttaatttcgatattatcttgattaaagcagcgatttttggcattttcccatgcgcgagtcttcgctataacatcatcatagtaaacaccgattgactcagcgcgtttcatgattgcttcgtcaagaacgatttcatcaaagattttagctgggtctacatataggttacgcatgatatgcgtgtacgaacggctgtgaatagtttcactgaacgtccaagtctggttccaagtatctaggcttgggtcagaaataagtgcagataaaactgctgctggagctcgtccttgaattgaatcaagaagagattggtacttcaagttatcagtgaagatattacgctgatgttctgggagtttttcaaactgaccacggtccatcataacgttaacttcttcaggacgccaaaagaaactcaattgcttctcaatgagttcctcgaatactttatgacgctgaatatcatagcgtgcaattcctagaccagaaccaaagaacatcggttcggtcatgatatctacttgcttggtattaaaaactgtactcattctatttcctattctgtggtgttaaccatccgtggtctaattataattcccttttattaaagcttacaggccgcgcagtcagcagagtcttgaatcatatcatcgttaccggaaccgtcacgggtgttatgatagtaaagagtcttaccaccaaagtaccagaaataaagcaagtcgtccatcattaccgacatttcaacttttcctttagggaaattcgccgggtcgtaataagtattagcagagatgctttggtctacaaatttctgcataatcagaacctggttcagataaggcttattaccctgtttcgcgagctgccaggcataatcataaagggaagcattgtgttcaacatttggaacgacttggttgaagcttccttcttttgattctttaactgacactggtccacgtggtggttcaatgccgttggtagagtttgatacctggctagacgattcgcatggcataagtgcagataacgttgaatttcggatgccgtatcgcttgaggtcttctcgcaggagttcccagtcacagacatagtttggagctgcgagttggtcaattctttcgttgtaccagtcaataggcagttcaccacgtccgtatcgtgtttctttgtaaagcgtgcatggacctttttcgctagcaagtttaacagaggctttgatgagtgcatattgaatacgttccatcatttcgtgagtaatatcattagcatctgcgtatgaagcaaagttgcttgctaaccaagctgcatagttagtaatgccaacacctagtgctcgacggtctttagcttttaacgctttgtctacaggatagtcttggtaatccaaaaggttatccaaagcccttaccattacttctgcgatttcgttaacttcttcttggtcttgccagttgaagttgtcgagtacgaatgctgcgagtgtgcatagcgcgatttcgccatcttcttggccaacatccgaagttggtaacgcaatttcgaggcagaggtttgattgcttaaccgtagccacatcacgaataaaaggaccatattcaccaacgttatctaccatgtacgggtaaattcgagcagtaccagcacgttcagtaaggaacaactcaaacagttcacgagctttaatacgtttctttcttatatctgggttcttttccagttcttcatataatgtacggaacgcttgagcatcacggaagtattctgtgtacagcacgccaagacatacatcgggactaaacagagtgatgtaatcattcttaatcaaacgttcaatcatcaggttattaatctgaacaccataatctaaatgacgaatacggttttcatctacacctttgttgttcttaagtacgaggaggttttcaacttccaagtgccagattggatagtacagtgtcgccgcgccaccacggactccaccttgggagcaggatttaactgctgtttggaagtgtttccagaaaggaataactccagtatgtttgacttcaccgaatccaatttttgaaccctctgcgcgaatcattccagcattaataccaatacctgcacgcttactgatgtattttgtaattgacgcagcagcttcattaattgaattaagactgtcaccgccttcaataaccacacatgaactaaactggcgtgtcggagtacgaacaccagacataattggagttggcaatgaaatctttttagtagaaactgcatcatagaaacgaataacgtttgctaaacgattttcgccatcatcttggtgcaagcacataccgatcaacataaaggcaaactgcggtgtttcatacaattcaccagtgtgacggtcttttacgagatacttctcgataagctgcattgttcctgcgtaagtcatagtgaaatcacgctcatgcttaatataagaatcaagcaaagcaatttcttctgctgaccatttactcagaatttctttatcatacttatttgcattaacacaccgggaaatgtggtcaataaaggcaggtggttcaaactgcccataaacacgtttacggatttcaaacatagctgcattagaagccacatattggtaatccggttcatcaatagaaatgctattcgccgctaccttaacgatagtcttttggatatctgcagtgctcatgccatcacgtagatgggatttaataatttcatataactcgtatgggtctacttttgttccttcgcatgcccattcgaggactttaatgattttctgcatgtcaaattcttgactaacgcctgagctcttaattacttgcataagtcctctaattcaaatgtatctttaaaaagtttattcactacaagagctattatatcaccatggcaaggaagcggtttgcaggtgcatcctaatctcattcctcttaaagtttctaagtgctctcgctttatttctccgttccgaatcttagcaataaaatcgtccttaaacgcagcaatagcatcaggacgattatcgcaatctttaccgacgtaatttccccacattgttcctcgttggatatttacatcgaagtcggaatggtatttattaaccacccgacatatcttcatgttatatcaacttcaaaccaacagattaattgtgttttgcctatagaccattcatatgatttaacaatagacagaaccctttgttcgatcccgtcaaaaactatcttgtcattaacttcaggcaaatcgctagagaatgcatcacacatctcgcctaatattgtttgtcctttacgaataaatcgaatattcatacagccattttccccttaattgttgggtgagattcatatccaactaattcaaagtggtgtggacgtgcaaactgctctaaccaacgaacctgagaaccagtctgccatgtttcatacgtatccggaaatgctattttaagttcgcataactctttaggttctcggcggagaatttctttgcattgctcaatgtgattcatgtaaatgtgagtattaccaccagtgaataccaaatgaccaggtttaagattggtcattttagcaataacatgaatcaatgcagcatacgaagcaatgttaaatggaagacccaagaacacatcaacagaacgctgataccactgaaggtctaaatatccattgcgaacgttgaactgatacatcatatgacacggtggcaatgccatccggttcaaatcaattgggttccaagcagtcacaatctgacgacgatcagttggcaattgcttaatacggtcaataaccaatttcaattggtcaacacccatgaaatctcgccactgtttgccatacacagggcctagttcaccaccagaatatcccatgtcttttgcctggttttcatagttgtcgtcccagacagttttaccttctagcaatgaaccatgctgaataagacgcaattcatgaacattagtagaaccacgcaagaaccaaatcagctctgcaatgcatgctttccatgcaagacgcttagtagttacagcaggaaatcctttttgtaaatcaaaccgaagctgggtaccaaactttgcgatagtaccggtaccagtacggtcatcagtctcgtatccattttcaaaaatatctttaattaattcttggtattcacgcattaaatttttcctgaagaggtgtaaagaaaagctggtctccacgcttttcaaatcgtccaataatagacactacatcatctttgaccatcacattgccatgtgacattccgatgaacatcttcttataatcacgttcaatttcaataggtatatttccacttcggttatatactgtagttgaaccgttataagtgctaagaccattataactgaaaactagaagatgaataccatgcttaaatggaaatcttttccacctcttttggactttgtcttctgatagctgagtgatatcatagtttgcgctcatagaccacctctgaaatgttagtcacttcatcaatatgataccagtgattttctttagtaatgaatcctgattctggccaagtaggagccaccacaaacgcaataggcagagtgacatcagaattcactctatgactttttctgatgattgtttggataaccttatctgcgtatggatatgccttctggatgattccggcaccacctatgatagaataattaaggtctctattaaaagtgatagtactgttgtaagaagtatgagcggccataatgtcaccacccaagaaaccgataaattcttcttcactaacatacgcgtcagcaaaaaatccgtttttagcagttgccaacgcacgactcatgtcttggacaacgattgtcttacgaccaggaagaggtttaggaaaactcatgaaagtctttgctccgcaaatcaagatagtatctcgagtacgattagcaaagtttttcatatcctgggaaatatgtttccaaggaagaccatcgcctaaaccaaaagcattttcgtttttgccatctacagtttttgtaggagcaaaggcataaactatttgaatcatttaaacctcagcaaaattcaactcgttcaacactgccgtcttcccacttctgttgaagctcttgaaggcgtttaattgcactgtcgacattggacattgcgcagatagttacccattcacggccgtcccaccaaatcaaatcatcgtaatcatctactgcgaaattttccattaaccttgcctcattccacacttaaaacaccggccacctaattgccataggctaccaccacagtacttacaatcccagtcagttaaaatccacatgacttgtacccactagctttaatcatgctctgaagagttttaaatccttcttttatggcttctgaaatttcctcaaatacttcctttttcagaatgtacaacgaacccgcttgattgccagaaagagctgaaataatcacctggtcattaattaaaaactcgccatatgctgaatcaattttacctgaaatttgattgcctcgggaatgagggtcaaatacgagctcaatatgagttactccagggatttcatcaaattggcaacgaatgttaacacgtggatatccaattacactaattttaggcatataaaaataatcctaatataataccgctaataaaagcggcagtaacagaaattaacaaaactactaattcagcctcaatcatttcttggccttagcgagtttaaatgcttttttgaattcttcaacatcttcaacgggaatccagaagcctgagccatacccatcttcatagcatgggcagttatcacagtaatcattccaatagacagtttcaccacccatagtgaatggagcttccatttggcacagtacttcttcaacacgctctaattcttctgggtttttatcgcaaatgcagaaattccatttaccacgatattcagaaccaagtttgatgctttgacgttgaagtttcatttttattctccagtagattatggagctatactatcacaagcatagctccttgtaaactactttttgaaaacttttttgatcaagtcaatcatttcttctgcattttctggggtaacgatcaagtccaagcgagtaggaccaggttggattgcactaccaatttcatatactggttcgaagtatttgaattcataatcagatatttcaaagtatgcatctccaaatccttcagcgtcagcagttgttccatctttaaattttacttctgtgatgaaactattatcttcgtcgagcattttagtaggaaagaacgaaccaccatgttcttcaatcatcaagcgcatccggcgatttccgctagatgaaaggtcccactcggcagcaagacttgggataatgcgatattctgtgttcagtttcataatttacccactgaaagtagttaatgtatcttcacggcattcatcatccatgccagggaaatattcttgttcaagccataaccatagggtaggagtatcaccttctacggtaatttcatttcctccccaaggcgcaggcttattatcaatttcagttagaccatatttttcaatgatttctttgaaaaattcataatcataaatttctacagtaacttgtgccattatcttttcctcaaagtagggacccgaaggtcccgatgataattactcttcccagtcttccatcatccaatcaatatcttcccattcatttgcttctaaccaagcacgaactgcttctttagaaccgcggaggtcaatatttggccaaccgccaccagggccttctttgataactaaatcaaaatcaataccatggtcagtgtcataaaaacgtgaaccatcttcaaacagaaggtcaatacaaacgttattgttaaagactggagttgctacgatatcaatgtttaatttacccatgatgttttcctctactcgttttgtttcgatgtagatatagtatcactcatcaactggcttgtaaacaattttgtgaaaatattttttggagggataaagaaaaagggacccgaaggtccctttatattagaggtcgttcagaatatcattcagatcgtcatcgccaacactgtcaccagcatcgcccatgatatcgtctgcggaacgagaagaggtcggtttggattcaaaatcagacaggtctttgtcaaaggaatccaggtcatcaccaattttatcggcttgagctgctgctttcgccgcggcaccaccaagagctgctgtacccataatctgtttaaatttggcttcgttaacttcaaacgatttaaactgagatggagcaacaatttcgctgaggtcagccatattttcggtcaggaatttctgagtttcttcatcattgatgtttgcaatctcggactgaccaaggaatttacattcatcatagttctggaaaccaccgactttcttaactttcatgacgaagtttgcaccttcatacacacaagttacatcaaccggagtttcacccatatcaacatcgacttcaaccatcgcgttgattttgtccataattttctgaccgaaacggaatttgaatactttaccttcgttttctgggttagccgggtctttaataaccaggatgttagaccagaaagaggttttacgtttcagaagcttatattcagccgggttgctgttataagaatcatttttactcagatgagcacaaaccgggcaagaatcaaaatcaccgtgagtagaagtacaattttcgatgtaccatttaccgccgtgtttgaaaccgtgattgattagttttacaaacggcagagagttttcatctttaccaggcaggaagcgaattactgcttgaccgttaccagcattatcggtcttcagtttccattcgtttttatcttcattagagaaagaagaaccacctttcagaccggccagttgctgttgaagttgagcaggattttttcttttgaacatgatttattttaccttgattttatttagacagttgtttgtgtgacgcgctattgcatttacagaaatacttttcccgcacactggacagttttttctgggcattgttttacctttcatgccacaaggatgaggttgtgtttgatgtcgtttcttagcaccatcactccaagtttttagaacttgtttacctcttgtattatttattctatcaccattttcataatagcgatgcaatccatttgaaattaatttcttatgctcttctgtctttggaacatctgttaagagttctgatattcttttacaatgatgttcagaatttttctttccaaatctaggagcattttcaccagaaccaccaaatttaccggaagcagtagataaattataaaacagttctgatttagcaacatcataatgtttatgataaaattcttcttcgtcaagagcgttatcacatacatgtagtattttaacatcgggtttttgaagcgaaattgcgttcaaaaatctttcttgttcacatgacgaccaatactcaatatttctgttgtcaaaaataacaccattgacaaaagtgcaatcatgttttgacccaatgtaataataaggtggagttttattctttaccctatcagtaaaggtaaaccaatatacgatattcattggataattatatactaatttctttacaagatttgattatgctaataaagagtttcttagcttcagcaccgtcaacgtttaaaagttttttataagcttttaatttagtagagtaattactccaaactaagttatccgttgcagtatcatgtgtatttattatatctaaaaacgagtcaagcatgatgaatgtctcgaaagatataacgtttgactgcagaagtttgaacacataagatgttccgactttctcattatattcaaaaatatcatgaagcttatctacattaactttcttagcaaagtagtaaatgttctttacatcttccgagaacgttgttttaatctgcttcaatttacctatatattcacgataaaacacgagggcatcagcatcactaatatcgccaatccatgcatcttggttagctacgaggttactcatgaatatcagtgttaactcttttaatgtatatttctcagcgagtttctcaaagaaatatttgtctctacgcttttgataagctttatcagagacccgcataacccagttatacttaacaacgtcatatcgaccggcaaagtgttgtttgagcattaaatataaaagataaacgctcttaccgttaacgtatctgttattatttccaggcatgcggagacgaatcataataaaaaatccagactattcgttttgtgtgtttgactaaatgatggacgaagcatattttcttccaatgcttctgacataattttttctatgattgcaggtggaatatatctattgaagtttccctcaggaatagaattttcttctaaccactgggttgttgcttcaagatatcccattccaagttctgttaccatagactcaatagtaaatccgttagcttgcttatctaacagctgattaatggattcagagggggaggtatccccctcgtctttaagcgaaaatagagtcataagcttctaccacttcatctttttcagtttcaaaacgatcgcgtgtgcctttatggaacagagcaagcagttgattaaacagtttgccttctacgccaagttctttcttggcgcggtctttaatgtctttgttaagttcaagatagctttctgctttcaacttattacctgaggcttccttaatcatatctcgcagagcctgtccatgtaccgcttcatcaaatactacttgctctttttctttcttagccattatattcaccttaaaagttgttaatttctttcattaatttagacagaccggatttaacaaagtagctataaattttaccacgacccggtagttgatagttattataacaatctaaaatgttagcaacaatgtcttcgcggatgtaatcaaaatcgattaacacacggttttctaagaaacgcttatactgttcttcagtaagcaaatctttaatgttttcgccagcatcaagacattcttcaacaaatgtcattttcgttgaaggagtacgctcaccatcaacatgggtgtaccaaaaatctgaacgaactttaatagaagcgacgttatctttcttgtcacctttaataattttaaccatgcaatctaaagcaggagagccggttttagatttcactaatttcttctgcattggtgaccattgcttaacattaggatacttatgcaattgagtaaagtcaccatcagaagaaacaatcataacaggatgaccttcgagactgaactttttggtcagtacagcaatactatcatcggcttcagctttatcaatatcaatgacgtaataaggcatatactgcttaaattcatcaattacagtacgaagaccttcaaagtaaccttcccagtcccaattggattcttcacgggctttagcacggttctttttataataatatgctacatcccggcgccagtatccgttgattgcattatcaacacaaatgacaatttttgtgtatccatctttcttccacttaaaagcattaaattttaaagtagaaagaataagatgacgaaccataggagtggttagtttatcgccttctttatacgtatgaagaattgtcgccattgcgatttgcgacaagtcaatcagaatgacaccttcttttacttggtcttcttcggcgaataagcaatttaaatcagacatttgaacctcgttcaattagttagtacagccattataaatacttctataatgaagcataaccccataggagactctatgagcgatttactgaaacaacatttccgtgcaacgaacggcttggacgcaggcggaaataaagttataaatgtggcactagctgaccgcaacgttaaaaccgacggcgtctccgtcgagtacgttattcaagaaaacactatccaaaaatatgacccgacacgtgggtatctcactgattttgctgtgacttatggacgtcgtatctggattgcaaataaagatattccaaagcctgctggagattttaaccaggcgaattggacttctttacgtgttgacccgaactggatttataccgtccgtaaaggagagtttgaaattcaatctggtcagttcatcaacgttgactctaacgctgcaggtaatgctacattactgcttccgttagcaccagatgaaggcgataccatcgtagttcgtgatattggcggccgtcctggctataacggaatcttaattaaagcacaagatactggtgcatctatcgtatttggtgaatcgcgtctgcgtgaggtaagacttacacgtccgtattcacaaattatgcttacgtttagtaatggtgcatggcgtgcaagtttaaccgattttggcgatactgctaaaatggtagttccgaacgggattgttccgacgcaagttcaggcaggtgataacgtagttcgtcgttatacttccaactcagagatttttattactctgccgttgttcgctaattcaaacgatatcatcaattttactgaccttgacggtacatcgccaattaaccatatgactgtgcgtacgtttgacccaactatctcaattgggactcctggacaaacagaggttcaagtacgtacttcaggtaatgggtttttggtatatgactcgattgacaaaatctggcgtatttttgaaaatgatttacgcacccgagtaagaataattacttctgacgttactttaatgcctaatgagcatatttctgtatttggcgcagataacaataccgttaaaacaattaacgttactttgcctacagacgtagctgttggggatactgtcaaaatcgcaatgaattatatgcgtaaaggacagactgtagtaattaaagcttctgatggtgataccatcgcgagtaatttgaatttactgcaatttccaaaacgttcagagtatccacctgatgcagcatgggtgcaatcaagctcgattacctttaacggaaccacgtcatatgttccagtacttgaacttgcttatattgaagaaaaagcaactggaaaaagttattggattgtaactgaatctgaccctaccgtagaacgtgttgatgctaaagacaatactaccagagcacgattaggtgttattgctcttgctacacaggctcaagctaatgcggagtcaaacccagaaaaagaattagcaattacgccagaaaccttaaacggacgtcgttctactgaaacccaaactggtatagcaagaattgcaacttccagcgaagttaatcagtcaacaactgcttcttacttggataatgtaatcgttactcctaaaaagcttaacgaaagagctgctactgaaactcgtagaggtttagcagagattgcgactaatgctaaaatggacgcaggtgaagacgattttacaattgttactcctaagaagttgctttatcgcactacatcggattcacggttaggtgttattcaattagtaaaaactggcggtgctcctaacacaactgctgaccgttcttctcttggcaccggtatattcgatcattctgattacaaaaatgcagttactccaaaaactcttcgtgagtataaagctactgtaaatcagtcaggaatagtttggttagcaagtgatagtgaagttagaaacggaactccttctgcttcaaatattcctacggttgttacaccggaagctttgcataaaaaagttgctactgatggagaaattggattaatccaaatagcttcacagacagaagttaatgctggcggagtgactaataaagcagttacacctaaaacattaaatgaccgtacagcaactaacgatcgtactggtattgctcgcttcgcgacacctggtgcccagggtgaatttgaagctggtacttcgagtacattaatggtaaaccctaaattactgttcgataaatttgctaatactgatcgtatccaagttaatactggttctggcttaactattactgggaacctctgggaccattataccatcaacatacaggaagcaagtacttctcaaagaggtacaaccactcttgctactgctgctgaggttagagctggaactgatgctaagaaaatagttactgctgccacgctacatgctaaaacagcaactgaaggagatattggtctcgctcagtatgctacacagtcacaagttgatgcaggcgcattaagcgatagaattgttcctcctgcttacttgaaacagactattcaggtaacagagtcatggcaagctacagacagcgttagagggaccgtgaggctatctacaggcgatggaacgtggaaaggtaatgataccgatggctcaactcttccggataacgggtatgactctaagggcgtcgcagtgtctccatatgaattgaacctcacgttgaaacattacttacctcgtcttggtaaagcctatgacaccggaatgctaggtggtcaaaccccagacaaatatgctcgtcgcgatatagcgcagactatttctggagcttggtcatttagtcaagacacttcatttagcaataatatttctgtccagaatattatatatgctaatggtggtgaagttaaaatttcaccaactgctgacaccggaaacgtgcatgttcgttttcaaaatagagatggaagcgagcgtggtataatttatgctgagccgcaaactgcttcagctggaactttaaaaattcgtgtcaaaaacggaacaggaactactgctgcaagccagacctacacatttggtggaaacggtacactagatgctcctaatgaagtatcaactaaaactctgaggtcttctggaaatgcaatagttggcggaactgttatggttaaggacgttcagatgcttgctgtcgagggattgaattcaatattcggcgcccaatcacagtccgcatttatttgttcccgtgacgctgatacacaaatttttgcacaggattcaactggatcgtatccaattttaactaccaaaaactatgcaagactagctgatggccgttatgttaataaagctggcgataccatgactggtaatcttaacttaagcggttctgctatcgtcattacaggttctgaatcatggtatgttccaacgaatgaaactgtactgagacaaggttcttggaccgctgaaattaaagacgctactaaactaaaaggtcttcgcggttatatggttccaatcagaacaccgattgaccctgctaacccaagcactttagtagtgaccggatatgaagaaaaaactgcagctggtggtgttttaactcaggttggtgtaactacaaacaatacttatcaactttggacgccttatcctccgacaaccgaaactgccgataagcgtttcgcgcatactgtgtggatgaggatttataatccaaaccttaataagtttgatgattggatgcgagtgttcacgtctgctactcctccgactgcagctgatattggtgctccgagctcagtatcaactcaggttaaaacccttgaagtcctggaatggattaagcttggcccagttaaaatctggccagaccgtccaaaccaaactctcaaatttgaatgggtaggtgattaatggctgaaccaattttaatggcagcctttggcgaggatttcgtggaaacacgaatcctctctgaggcaaactctgtgaagtattggctaaaagcttatgctacgcattctaatgctgttcctaataagccagaattgaatattaatggtgcctttgatatgacctcctccttacggagggggattaatgttgttcaagttaatggtgacagttttattaactttaaaacttttgatgttaccactgatgataacaacgctaataacaaagcgtttgtagaatatgcaaatggattaacttcaggattgtatattataatgacacatgaacgatttcaatccagcccgttaatagacagatggtttaaaaacaagtggtctgcttcttggccaggttctgacttttccaaatcatttccaaactctgcctatgttggagtgctcggagcagcaaaaggacgtatattaattgagtcattttacggaaatgatggtgtagttaaagaagattccagagctaaagtagatactgtatatgataacgttggcgatgtaggatatacaggctgcccttatcgttccattgaagacactaatgagtactcggattctactggatatgaatataagcgatatccagttcaaaatgaatctataagcaaaatcgctgattatggattatctcccggggattcggtgtttttagtgtgtgatatgtatgcatctaaaagccttcttgacgctggttctactactagggctaacttgagatggttcaaaggtacatctttattatcttcaagcgtatcattagaaattccacaaaatggagctgatagatggctaagatttgaaagatttaccgctgttcctacagacgctgatggatttactattgtggtatcacgatatccaaaaacgtccgtagttggtgattctaaaatcaaaaaccttgtatttgttcaaaccgcacacagcgaaaaacttaacagtgttgttcaagaatttggcgtgaatggcgtaagaatgaataaaggcgttgaaggaggaaccactatgattatggaacttccaaattcaaaagtcgatccgagcggtgttattccagttcaatcgttcagagaaacatcagactaaggaagcctttgggcttccttttttcgtataaatagaaaatatataagaggataaactatggccgatttaaaagcaggttcaacagttggtggaaatcctatttggcacgcaggtacttttcctcttgtgccggcaggaaactccctaacttatagaggtgtaaaggtttatactgagatagataaacctcaagcaaatgataatgatttcgtatctaaagctaatggtggcacaggttctcaaggtttccaaaaggaagtcgaatttaaagaaggcgtaaaagtttctgcgaccttcagtggcggcaacagtttaaacgggctttattctggtaatggagactcagcatctctaacaacagcgaacattgacattgtttcatggtacggtgtcggtattcgtacttcactggagggtagagaacggacagtagtttggaacgctagaaccggggaccaaataaacaaaggaagtataacagcttctattcttagttctaataatgctcctacagccgctcagcatttaacgcgtaaagattatgtcgatggacgaataaatactgttagcaacgtagctaacgcagcagttagaaaagccggcgataccatgacaggtgtacttagagccgaagctggcgtagttatagtaaacacagcaacatccggtgaatatgctcctagattagatcaggttatttcacgcggggtaacaatagattttggcacatactaagaggtagccatggccgatcaaaacttaaaacaaatacaatttaaaagaactagcacagagaataaagcaccaggtgcagatatcgtagcccgtggcgaaatcgctttgaatacacatgggcgtactcttgccatttatactaaagatgaaaatgatgccgtagtacagctcgccggtaaaggggttcctttcttagatacatctggaactcttagcgttgatggaactactacattaaaagacaacgttactatttctccgaataaagcgatcagttttgaaactactgatttgagtggtgaaataactcgtcatatcgttggcaaatgtgctactaatgatggctggtacattggtgccggtggtacaagcaataacgggattcttgaaatcggtactattgatgatggcgttgaaactattcaattcgtacagcgcggagctggcaacgtcgaagcccgaaaacttgtcttacttgatggttctggtaatactactcttcctggcgatttaagattatctaccaataaagccattaaaatttacaatggaagcactagcgtccttgaaatgggcgtaggagctaatgatgtctatattaaaaaccaaaaaggcacaggtgttcttcaattaaccaatgatagtaatctgtcgttcagaaattatcaggtttattacgccatgaacggaagaggtcctggtaaatccggcactcttctgacgaatgtagaaaacaaccgtcaggcatggcaatacgtaatttctgctgcaactgcgtcaactgctcgctgggtaaaagtagctacaataaagcatccaggaatgggttcttcgcaactggatttaatgattagcggtggtattgattctgagcacgatagacattacgttgattttatcacgttatcaggacgaaatttaacatcatggagcaccaacaatttagataaatgggttgaatggcgccgaattggttctccgtctaaaacaaacgttccagagtattacgttgttaaaaatgatgctgctacagattcagaggcttcatttgatttttatgctaaagttcctcgttatggcaatggcctttatgttacagtgctaaacacatctggatacaacggccaagattcaggtacagtaattatctatgaaaccaatcaggacactggtgatactggaccgtccggaagtattcttgtttcaatgaaacagatttttgatagtttagcaaaaccagatttcggtgataccacaggtactcttccggttaaccgtggtggtacaggtgctactaacgtaggagacgctcgaaataacctgggtcttagaactgcggctgttcgtgatgtcggtgaatccagtggaaacgtgatggaagttggtgccttcggtattggtggtcacggaaaatcacttgtagatattacttctgacgttgatttaatgactcgccttaaggctcttggcggtacaacgtttagagccaacgtagcgagtggttataccggggctccttattattcacatggcgcaggtttcttttctagaactggcgatacaatgtctgcgcttaatatagattacgcaactggtaatgtcagagtatttgctataaacgatagcggtttagcaagtggaagagtgaatgctaatgttctttacggaactgcaaataaaccatctaaagctgacgttggacttgataatctgacaaacgatacccaagttaagaaagccggcgacaccatgacaggcgatttaactgctcctaacttccacgcttctgggccgggaactgcatcagtatatgttaatgctggaaccggaaatgctcatgtatggtttagaaccgatggtaatgaacgcggcgtaatctgggcaactccgaatactacggatttaggtcagattaatattagtgcaaaaaccacagctggtgtttctgctggtgattttagcttccgttctgatggccgccttgatgttcctgtagcagttaaaattggtggagcagcaatgctaaccaaagacgggaacatcacctccggttcaatgtttggtggtaaccttaacaactatttgacttctattaaaaatgatatcaccactggcgatagtaagcaagtaagcaagactggtgataccatgaccggtaacttgactattaacgctaacttaaaagtcgaaaatcccaatggaacgatggttgatttaggttcagagaactcggacaagtacagtagattaacccttgctcgtaaagttggtagcggtgctaccgtagcaatgcttaaaattactcctgaaggatacgtgcaatttggttatcaaactgcggtttctaatccagctcctagtaaatatattctagttaaatctagcggccttgaggtagaaggggacttggtttttaaccagacatatcgtggtgctgaagacgcagttgatattactgataagactgttgaccttaatggtcttgtcattaaaggaaccgacccaggtactcgtcagatgtataaatgcttctcatatggtggtggttctaatatatcgaacaaacctacctctgacagcaactttgttcttgaagttctatctttgcgtaaaatttctgatactgattggacttgtaagcagacctttactacaaaaggtaatgttgaaggtacatatgttcgatactgccaaaacggcacatggtctgcatggaaagaggttgttgcaggggttcagccaattaatttaggtggtactggtgcaacttctgtagctgccgctcgtaataacctcggtgttggtgaatggcaatctgtggcatttggtgtattgaatgtcaacggcgttagtaatgcagacccggccatcacatttaaaaatggggctatggttcgtgaagcccaaggtggtagtctcggcgcgttaatcctgtcggcttctactgcatctccagacggcgcgaaatatattgcttttcgacccttcggtgattcgtctggtactgagattagagtaaaagccaacgggtcaagtgagtcactacttgaatggtcttatggcccaggtattcgttcaaattcatctggcgcttttgttatctacgcaaaaacaggtcaggcactccatttaagaccgaacggtgacagctcgaaccaagctacagttatcgatcagaacggtaaaatgacagtcggcggtgagttcgaggcgcagaactcgaaaatcacaggtaacttgaacgtctctgaagataacaggatgatcgttcttggcaaaaactccgatattggtttagtcaagaaaagtggtatgccaggaaaaatggctattagtaaatctaactcgtttactgttatggtatcaaccaataccaataaccaaattaatcctgctgatacgtttaacgatatattcaaggtagatgccgacggaaaccaaaccgtttacggaaatgcccaagttaacagacaattaactgtttctagttcagctactgttgcaggtgttattaatgctaacggcggtattattgttcctactaccaagtatgtgcaaattgccgatgctcctacacagaataaccaagccaccaacaagaaatatgttgatgataaggttgcttctgctattagtaatgctggtgatacttatcttccattagcaggtggtactgtaaccggaagattaataattacaggtgatcagttaaaaactacatcgctctggactaccggagacgctgctgttaacggtgctttaactgttgacggtaatgttgttagtaattacggtattggtagctttgttggtgctgtcgatgttaaggcccctgccgcagataatggtacaacccacctttggttccgacattccaatggtggtgagcgtggtgtgatttatatgccgcgtgacaataataccatgatgggtttaagagccggtggaagtgaatggcaattacatggctctgcaggccaaatggtagggccaggcgcacggtggagaattcattctgatggtaacctacagggtgatgtttacggtggttatatcactaactatatcaacgataggtttaaccaatgtgcacagtgggttcgtactggtgctcaacaagactttggtccaattggtcgtccagcacctggtaaaactgttcctggcggttgggtgcttgttggtcttaacggtaacagtaacgaagctaaccagaatatgcaacttatcggtggacgtttacaagtatggaaaccgggcgttcaatgggttgattctgctacttgataataaggggcttcggcccctttaaacttaaaggtaaaactaatgattattaaacaaatgaaaggtattcaatggcatcacaatttcgagggcggagcttattatcgagactgcaacgacaagtgctggtattcttttagaaattctctcgataaaaattctcatatcattatagttaatgctaaaaccaacaagataattaattactataatggcgaagaccccaccatgatcgggttatttgcagataaagaaatgattttggatgtataccaacttgactattttcctgttgattcatgggatgaattcacacaaagagaatttgaatttgtagacgaacaagttgtgatgactaaagacgtacaagttcctaaagaaagaactaaagatgacattatgaaagacttgatgaagcttaaagctgaattggaatcattgcaataaatagctctgtaaggagagcaatatggcaagcaaacaatcaataccattttttgatatgtttcttgggttgctcgagctattattcaaagatggagccacgggaagagttctcttttcccgtgttttcgttgtcgtacttttagcattgttggcgtttgctggatataagtctgatagtcttattaccgcttacgtcgacagtacttatgacaagtatgataaactggttcaaaaggatagagattcccgatttgataatacagcactcgaacaactccagatagtacatatctcaagcggtgcagatttttctgcggtctttacgttcagacctaaaaacttgaactacttcgtagacttaattgcttatgaggggactttacctagcacggtagattctaaaaacctgggaggatatccaatcgacaaaacaactgctgaatatagcacgcatttatcgggtagatatttttggacggataaggaatttgttttcttaccaacaaaaagaaaaccgcctgaaatatcgtatatgtttagctgtccatatttcaatttagacaatgtttatgctggaactgttgaaatgtactggtacaattccaaacctgcattatctaacgaaagactaacatcgatatgtggtcaggcggttagagctcttggaagagctaagtgattacttattactatgcatagccattgttcgatagatagactcaaatccctcgttgtattcttcaacgagaattctcttctcttcgtcagttaactcagaaaccattttacgaaagttgctctgatttaactgacgcccctgctcgttcttgattccgatttcattcaaaaacgcaatgaattcatctcgcttctccatgatatgttcagcattgaacttagtcagaatagaagcaacagtaacaatttcttggacaatttcaaacttagtcattatttttcctacaacataatggattatgtgattatagtatcatcttgataccgcgttgtaaaccagtttatgccaattcccaacgagaattcaaatcttccttggtagtgatatactcagcaccagaggacatccagagcccgtagcgaccatcttttactctagccgttaaataccattcctttccaattggacgaaccctacgattcatccagtgacatacgtcaattgcctcttgaaaggacaagtcaatcagacttccaagcgcgattttattcattaacgcttcgagatatctttgtgattcaacgacagattctaagttatgactcatgctaaaacaacctctccgcgattacctaaaatgctttcgatatactcaactccacttataatgtcacctctatccttggcttcgtcttctctgcgtaaagcttcagtattcatagataatctccaatgtcataagcatcaacacatttctgaaattgctcaataacttcttcaggttcaacgttagcaataatagctacagtaaaggtaccattattccaatcatgtaccatccagtccccatatccggcattctgaaggtcttccattagttcagaatggatatctgctactaatccagaatggtcccctaatttcttatggagagcttctaggtcatcacaaataatagttaaagtagtacatttggaattattcagaatgcgcattgtctttacctttatgtttttgcttgcgttttgattctttggcagcacgctttttatctttatgcgcgcctcctttgttaaagtcatgtttagctactagattttgcactttcaagttccttgatgtaatagtcaatatctttaatcatttcttctgtcattactttgtacatttcagcaagaaatggtttagcaccaccattaaatggatggctaaacgggcagatgtattctttatccatgagagttttcatgaatttgctgtctgccattttaaacccggcttcattggtatatgtaccccaattattgtccatcatttctaatgagcgctgaagcgatttacgttgaatttttaaaagcgtaatgttattctttaatgtactaatcattagtataaatcctctgagaataattcattggctggtcctgatttaggacgaactgtattaacttgacctgcatgtgtagcgatgattaatgcttcttcacgcgtgaagtactcaccccattggtcaacaaatccttgattgtctccatggacatgatcagaaaccaatttgtcgcgaaacatatctaaaacgttcgccatatcaacagaatagtggcgagtgcctggaactacaattgttccaccagttttcaattcaaaacggtttgctgcacaaacgatacgacgttgaagtaatcgtccatcccaccaatcagctactttaaagcagatttctggaatttcgctatttacattacacatttgaccaacttctcgttaaaggttttaataacttcacggccatggtctgcacctttcttacagtctgcaattgtccatgcttcaccgttttggtatttgtgaagagcccgggtattaatatctttcacaagattcataatcaaatcattaatttcttgttcagtcatttaaagaatcctttaattttctgccacaaacttttcttttcacgaataccgatttgacgaataacaggttcaccctgcattttctctaaccactccattgagttaacagcttccgccaatggaacaaatttagcaagggccttttggtaattatctacatccatgatatgtttaccatctgcattgtagatagcatagcattttgcgaatttcttatcaatgtatccgataaagtgcccacggaaccatacatcccaacaatcagttggcatgttaagatttaaattaaccttttcaacacagcgctgcagttcattcaatactttaaacttgttcattacagttccttaatagagcggatgatggtttcaatattttcagcagtacgagcgatatctaagtaagtattacctgttgcagctacacggcaagacattccgaggtcagtgaagtgtttctgatgctcttcagaaatcttgtaaccgaagatacggaaagtacctttgttgttaacttcaagactacgaataccgaatgtacgtttttccagaactgcgatatagttactacggtaaactgtaagctctttcagaggcaagatatcttccatctcgctaagaatgctcatcatcaagtctttatgttcattcatgtcttcagtcagaggacgagctttgcgggtgttacgttttttcagaagttcaggcttattttcttctgcatagataactgctgctttagagatgatgtcctgtgcttcaccagtgatgattagaccgtcaccagatttctcgataagacctttcttaatcagaacaccaatgtttgagtttacagaacttgcgttcatagtttcttcaaggatttcacgcagttcagcagaagtgatgaaatcttttttagctacctgaaccagaatagcagcagttttttcgttcagagcatcttcggaagctttgatgatgtaagttactttagacattgtgattctccatgatgttttattcaatttgtttggtatgagactataataacatctgctaaccagcttgtaaaccattttattctgctctctgaaaaattcttcaaagagcagtaaaaatgttatacgttaaagatcaagaatttatcgccattttcaagcttaagcacccagaaatcatcgtatacgcaaagaacgacttggtactcttcaccatcttcatagttacttgcttgaattacctgacgcataggatactcgcgattaacttcgaactcatcgagcaccacaatgttacctttgacatagtggctcagtcgagtgccatcagcttgagtagaaatataaagaatgtttttgatatcagattttaatgatgtaatcattttgttttactccgtgttgttttgatatggctataataccacagccatgtaagcatgtaaacaactttgtgaaaataatttggggcattctaaggagggattttggagggatatagatttatatggaaggacctggagatgacctccaggttccctagattaactgaggagcaataaaactaaaccaaatacagcaattacagaacctataattaaataaaattctatcatagttcttccaggtctttcagatactcggcttcaggcgttgtcttttcccagtacttaacctcttgtgctaggcgttttgcttcctgagcaagtttcttcgcttcatcatcagtgatgtgatagatattcattgaaacgagtttttcagaatggtctttgaatagttcattctgttcaatttctttagtcaactgcttacgagttttaccttggataacgatgttacctgcaataacctctttgataaattgagcttttgcctgagcaagattaaacgcctgcttagtttcagcgattttatgctcaattcgtttggcggtgaatgtcttacggacttctacaaaatgacgaatcagctcaccggaagttttgaacttgtcattcagcttaccattctcatcaatgaccacaatgtattgactcattttctcaatgagcttaaagtccttcatgattttagcatgacgctgctcagggtcatcgctcaaagcatagtctttacggaatttcaccttaaagccaaacccggtcttagaacagtcatcatcgtatgtgatgtatcctgcatcttccaatgggtcaagtactttttcaacataagaagcacgttcaaacttatatggaatttcactgatatagattgagttccgtgaagtttctttatacacgccgtgcagctcaacagaaccgtcttctgtttggacgatttttccgttaaatttaggaaactgtacttcaggttccatcatttcaccgcgaagtgctgctttagtgcattccaaaacagattcaaaactatgcggaagaatagaagttgaataacctgttgcaataccgcgaacaccattcagaagaacagttggaattaccggaagataataagcaggtggaacatgctctttatctttatgcaccggagcgatttctgtgtctttgtagattttacggaagttgtcagaaatccggcagaaaatataacgacttgccgcagcagattgaaccaaacgagaaccgaagttaccttgtccatctaacagaggatagttgttattccatgtgtttgccatcagtgcaccagcatcttgggcagacgtttcaccatgatgatatcctaaatcagccacaccaccggcgacagacgcaagcttatggaatttttctttattaccgcgagctaaatcaagagcccgagcaataacaaaccgttgtacaggtttaaacccatcaattaagttcggaatagcgcggttttctacagtgtaaatcgcatactcttttgcttcattatcaatgatagatttcaaatcgcgatgacgaagatttgacgccttagccaaatcatcaatagaacctgcttgttttaatagagtgtcaaaaatatccattgtacctaccagattagtgagccgatttgtactataacatcggaaatgaaaagcacaatataaatcattccgtaaatcattccatagtacataactaatagaaaggcggcagcaatagctgccacaattaggagtttcttaatcatttgtaaactcctacaattttacaaatgcgctcaaacataataaatgctgcggtgaacgcaatacttccgattactttagtggtaggcacaaggccataccacatgaatgttcctgagcaaatcattagggccatcagaaacacatagcccatcacgaagaaggttctcattagtatttctgcaaagtaaagatgaagttatcattcagaatacgattcagctcagagtaggtctgcgcgtcacttgaatgctgacgagtaaacgccagtgcaagttgacctttgccataaccagtggtgagtggtttcattttattagcaggaatccagaacacaccgtaggtcatgcaattcgagcgcagagtacgacccaactgagaacgtccagaacggatatgagaaagaacactttcaaatcctgcctttgaacgctgtttagctacaaagaaacgagcagatgcaccgatataacctgctttgccatcattgaacatcaaaaaataaaatccttcgcgctcagtaatttcacgagcaggaatacctgctacccaatcaccgttactaatagaaccgatcagttctgcgccagcattatcgagatcagcaaaagtcataatattacgcatgttaatttcctcagttgattaaagtttattctccgatgaggggccgaagccccttctactaccaaaaatatactactgccgttacaccaccaacccaaaacacaagaagacctaaagcaagcagacgatacacgatgtgtcgtttcatttttgaccttcccatacggtttctactaaggatttaaggccatcagtttgaataatatcaatcgcattaatggcaaaataaattccgaatccgaacacggtgacaattccaagcgctaccgcaacgataaaggacataacaacggttctcattaagttaaagcgacgatcaaaactactacgaatcattatattttcctcagatgaaagcattaatccaaacgttaactaaatcccatgcgaaaacaccaatgaaagtaacgataaggcagaatactacaaaggtgttcttcaaaatcgtaagtaactttttcattttgttctccagtttagctaacaggattatagtatcaccgaagaacaaaaaagtaaaccattaaatgcacaagttacgaattttttcttctaaagctttaactttatctatatgctcatcgcgagctgcagcggctccattgggatacaatccgccgtaagttgaatcgccattatcacaagcaatgatagtataatgccaattcatagattcgagaatcctatactctttcaaaagttcagctttaatagaagcatttccgcgtttagctcgaagtgattttagctctaagtaactcatgttttactcccgttcagtttgtaaggccatagtatcatggccaatcccggaagtaaactactttttaaaatttatgcatgatgtacccgccagctccaactcgtgaaggttttactacttccatgaggtgttcgatgccaccggcaaacattggtgtgtaccgtatgacattctgggacacttcttctgcaacgaatataattatacagtctgcgactttatgtttaaacatgggccctagatttattccacttccattagggaatagaccgtctttaccagtcgtaacattaatccatggcttatgatttgctcggtcatgaacaaagtgtgttttaacttcaactctaacaccttggtagtgtggatgagctaatacgtcccatgcccattcgtatggatcgttgttattatggtcaacaacttgatcgttcacgtatccatcgagaaaatctgctaccacatactctgccggtatagcaattctgcatcgtttaagaacgtcaattctatcttgagatggatcgatatctaagctatatctagcagtatcaatgatttttacttttgcttcaccccttagcttattcaaatctagggtaaatgtccgcaactggttcaatctctgcagggctttgttcatcaatgccataaattcctctgatatgcaattcaccaaaataaacacgatcgtcgtagttacatgtgtctggttccacaacaaaatcatcaccaagctcaacaagttcgtcacaatgcaaccaagcatagtgaacatcaccttcatgtttaactacatgatggcaaaacaccgtagccgcatgatgagtaccacgaagattaacaactttagaatgagatacattaaatggattaatcatgtttcacccataataaaagaggagcccgaaggctccttataattagcgaagttctgaaccccaacgatcagttacatcttctaatactacgtaaccacatgtacgcattttagcatcgttgtaatcaaccgggatagatactacatcacgcggatgaactttaactgaaacaatacggtcagaaccactaccgaagtgaccgatgtaagatttagagcagacatgcagacctgcggaacaagtacgctgatcgtcttcatctacctggttacgcggcattgtaacagttttacccggagagttatcaaatgtgtttgaagcacagtccatataagtggaacgaactactttccaaccaatgaagtgaccgtcatcagtgatgtcaatatcgtttgcattcaggaaatcaaacagacgataaactgcacgacgagatgggttcagcatcaggttttccaggaaaggcagataacgtttaaagtcttcgccatcttccatagctcgaacgatacgctcagtcagaccagatttcagctcgatatctttatagaacaaagtgccatcttcaattcggacgttaccctgaacgaattttttgatgccttgttccaggttaatgtggtcaatagcaccagcgatatcaccatctacaagtttctgcaatgcagatttaaatccaggatgttggctatcggcattataagtagtacggccttcagtaattgaaatgaatttggaacttgctgcccatttaaattcacgctcaactggagcttctactttagcaggaacagctgccgcggcagctcgagcttcgcgctctttaaacacacgccgaatagtgtcacgggaaacaccataattctcggcgagctctttcttagtgtacagaccgtttttgaagtttttaacgattgcatctttttggatttcagacagacaggtaacagccatttattcacctttattttcagaattttgagtagaagctccatcaaggagctccatgatttttacgatatcatcgacgagtttgctgtcagtccgccaagtatccaagacacttgcgatgacaggataatcatctttaaactgttcaatctttttatagaagattgtctcagcatcaccagacagtttattataaattttattacataaagctaaatcatcgttttcatctttgattttacttgtgcgacaaaccttagcgattttgtttaattttgtcaggaacggatttttcattccagacgctgtaaacttactcgacaagaaattcaatttatcgtaatgcgcaatatttccacagatacgatttccagtagcatttgatggcatgtactggtcataatctaccttatcaatacacttgatgtattggtcgataataaatcggtcaaatgaaagcaatccatcagcttttgccgcggctttcatagcacccggacgaattgcatagaatttcttaattccacacgcttctgccagagaccgcatgctcgcgatgttcatattccaccaccaaacattatctgggaaagtgtggatttcatcacgattacgaccgattgcataaccttcaagctcagcaatttcagatgatactaaagtctgacggtcttcttcccaatacccgtctttatcaatccaatgtaatgacacattaggagatttcggacgtttctcttttggaccagtgtcataatcaggaagagcttttctctgggcttcaagttcagacacacggaatactacaacttcatcagtatccatgattttcttcagctcatcaatgacatgcaattcatcttcattgtctttgattacggtaatgtgtgcccagattggaactaatccagatttacacagggctcgaacagtagcaatacgcttgcctgctttatcgtcaataagaacgaacgctttagttctatcaaccccgcaaatatcagaaatgtttacttggttatgacgatgccaagaactgcttgacactttacgacgagcaggttcatcacatgaaacataaactgatacttcgttatcaacataatatgaacgaattttatcaagattatacttcgcaactacctgtttaatatcgcggttcccaatggtaataccacggctctgaagaatagagcgttccttagaactcagcttattgaactcgcgcaggaattcacgatcagattcatacgcttcaaacgctttaatatctgcagtaattacctcttcttcaagagcattcacgcgcttctggatattggcaattgtttcttcatcaagagaaagctcttcacgagatggagtaatgtctaattcgccaagagtgaaatgaacataaaccttgccataacgattaagcagccaatctgccttaacatctacaccgctaatcggatatacgatttttccataaactgcatacagaccataactttcatacgaactattaacgctgaaccagtcagtcttatctacagggaaatattcaatttcacggcgaagagaatctacctttggaggtacagcaccaaaggtacgcaaaatatatgcgatttcataatgccaagtatcaatatcttctactttaaccggaactgtaatttcaagaccagtttcttcgtcttctttcatgtcatcaacgaacattggacgaatagtaggttcaccacggtttttcatgacagtataacctgtagctttaccatcatgataagacactacgttaaatgtactcgtgtagctcagtggagatttagaaccaagaccaagagcaccgatgaaatcattactattattctttgtggattcaaagaacgttttgtacatcgtcatcatgtcattatgattaagacctgggccataatcacgaattacaaagcgcgggtcaagacgagttggtgctttgatgtaaaatggacgattttcattaccattcagtttatgagcatcatcgcagttagtagaaagttcacgaacaacagcacgaactttatacttataaagtttatttgacaaaatgtcaaaagctttacctgaagctttaatggtaaacgttgaatcgtcagcgtcagaagaaccaataattacttcatcatcacatttaattttcattttattcctatcaattgtgtcgtttaatgatttctgctacttcaagtaactcttcagcagtagcggtgttagttgtaaaaattttattatggatttctttgaagcgttctttgaattcctcagctgcttggatgtcaaagaaccgctggatgatacgatattcacgatatatagcatcgttgaataattcttctgatgggatgtaactacgtttcataatattttcctcagtgatttaggggaaattatatcactataactttaagcaagaatcctagaatcatctccaagcacttcttgattaaagccatataaatccattcttataaagaaaaagggacccggaggtcccttagattaccacaccctactaactcgaccataaacctcatgtttagaaccatcaatgttttccacccagatagtaacccaagttccgggcagaggtttcttttcagcgaacagatatccatagtcgcctgagatcaaagtaatccaataacgttgcatgttaattccttctaagtaagggcaatagtacccttactatttattctttattcactcatccatgtcttacgtggagcagcatcgttacccatgattaattcaaaaagttctttccagttttcaggaagagtgactacatcataaaccgggtcttgaataacacgttcgtattcatcttcttcaagagaaccaagacctttaatataacgaagtttccaacctttgaaatcatctttatggtcttcatattcaccaagagaatagaaccaacgttgttctttacctttagtaagaataataacaggagttttcacaaagcggattcgaccttgttcaaataattctggccaattactaaagaacgccaaaagacttgggaaaattgaaccaacaccatcaacgtctgcatcagtcatgatggcaatatttcgatagttagtattttcagcgggttcaccgatagtcaaaccagtgattgcacaaatgtcaaatacttctttattcttcatcgcatccgcagcagacattccccatgtattcatgaacttaccacgcaaaggatatccgccatgaagttcacggtcacgagttgtaagtagataaccgatcgcagaatcaccttcggttaagaataaagttgtgtcagcatctttaccatatttgttggctttgatgtgcttagctactttggctttctgtgcctttttagcagctttagtttcagcagctttctctgcagcaagtttacgagctaacatcgcctcaataatcggcatatgaatatcttctgatttcataatagcgttagcaagcttcttgtaatcaatatcaatatgactacgaatttctccccaaggagaagtcagacgctctttagtctgagaatcaaatcgcatgttagacatatcacgaataaacatgatgacagtcaggcattctttaattcgggctttgttgacttcaagcttgtacttgcgtttcaatgcaggaataagctcattgctgagttcatcaagaactaaatcaacgtgcgtgccaccgtttttggtgtgaatgttattaacatatgaaagttgacggaacccgtcatccgaacgaccaatggcaatagcacaagtatcagaatcctgcactacagcattttcgtcatacatgtgggcgtaagctttaaacttgccttgaacccgtttacccatgaatttaaattcaatatcaggataaactactgctaatgtcatcagacggtcatgaatgatggattggtcaacatcagttaagccatcagattcaaagtgggtgaaatctgggataaatgacacgacagtaccagtcttgtctttaataaattctttatctttagctggatgttcttcccaagaaacattctctgcgccatttgaacagcagacaacgatttcattttttccatcacaggttgcacccacaaatgtcacagaaaaaatatttgttaacgcagaaccgacaccgttcataccaccagttttacgctcagaatcatcaccaaagttaccacccgcacgaggacgagtccatgcagctactggtcctggaatagtttctccttcaggtgttactacaggagcctgcggaagaccacgaccgttatctgttacaataattttgttgcctttaatgtcaactgaaatcttgttcgcatgtttgaaattagtacgaatagcttcatcaacagagttatcaatgatttcatcaatcagtttgataataccaggaacatactttactgattggaatttaccaaaaagaaaacggtcatgcgcttcaaacgcagaactaccaatgtacattccgctacgcttaatgatatgttctcggtcactcagaattttaatttcgttcttaatcattacatttcctcggttagtgaaggaattatatcaactattaattatagcaagtaattcttctttgatatacatcaatttaccaagaacctcatggcctcctttaaccgctttatactcgggatatcgtggccgctgtcgttcaaacatagtccattgagcatcactaacgttagcgtatgcatatcgagaatttccgtagtattgttcaatccggtactcgttattttcattaagtgaaatccattcttcacagacttcataatatttctgcatccaaatagtacgaccattcacgtcattgattggccaccaagcaaacctatattttccaatagcccgctctaccatttttaactgtcgtttagcacgcctttgcgcagttgtcattccaataatcataatattctcctctggccaacaagactataataccaaaacacgatgtccatgtaaacaactaaatgacccgaaggtcatttattcataacgaattgtgctgttcttgagaaaaagtcctgagcacactgttccgttaacaggttttcctgttggtccaatagccgtaaagcctgtgtgctgaaaatcatcctctgagcaagaaaagaacttatatccggtgattttgatatcagtaaatcccgcgttatctaacacgcgagttgcgttatcagcgtcagtgcatccaatcatcatgaaggcaagcgctgtaattaaaatctttttcattttaattttaatttaaccctataagttatattacctactttaataacccggatttctccgggtttcatggtaatgcgtgctttagttcccatcaataatcaccactctttaatccatcgtagtgaactgccggagcagaaactactcgcttcatttgaccttcacacttagggttaaagcagttaacagtatagtcacgatgggaaattttacgcataatttctatcttttttccacagacttcacacttgtaatcatacattggcattaacagcatccttccatttttgtgttttgaccacgatttgctcatttagtgcacgagtaaccatcatggagatttcatcatctgatacatgggtatcatttttatggcgatttctgaaatgcagccaaagtgcatccactacacagttaataacatctgcgcactcgccttcaaattcttctttctgccgccatggacgattaatccaatcacacatttctccagtttctgaagaaagttgcagcatgacattcccaatgctacggttaggaataggataagacagttttgatgcttcaaaaataggagctaaatttaacattgatacgcactctgcagtgctgcaatagcagcgattgcttgaccacggttatgaatagaaagattcataaccaaatcggttggaattacattcgcggaagttccaacttcagtaaagtatttgaattcgctatcaaaaattacaaggtcttcaccgccgacttcatcacattctgtgccattagcccacataattcccgatactctattattttggtggtcaactttagtaacagtaaaactcccaccattttcatagagttcatacacaaagtcttcattaacctcatagcgtgaagaaaattcttcttcagcttcatcattgacgaatttgtactgtacgccttctttaaaattcattacacaatctccatgtattctgggccatcaactgtgattacgcgagcaaaggtacgaactgggacaatatcaccatggttcgcgaatacatacaaccaggtccaatgctcttctttaccgaaggttttctctttctgaacgacgattaagtccgggttgaatagaatgtcttcaaaagcttcagcagtaatttttacggtattttcagttttcatgttattctcctcagtagttgataagataatagtaccacatccttgtggtaaagtaaacaactttttaaactaaacctggattttgtgattctgtcggctctacatcagctttaggcagaactgcatagttgccttgaaacactacgtttactaaggttttaccgtcttcttcccactcatcagtgacaagaacatttttatgcagcgacagattagtggctgaattagtagaactcaccgattgggtaataacattgtcaagtgaattcacatgtacccacttgcgcagatagctttcgttaaacatagaatcaagcaaatcgcgcgattctagagcaactacgaatttttgcagcgaatacacggctttgtcttcattttccaattgaagcaaatatgaagacattttgttagaacggttaaagattccaacaattacgccttctttaccgatatgcttaccaccaattactttaacgttttcgcctacaaccaaatttttcatcgtgtttctctcagtttgttaatgtagagccattatataatggctctttcataaagtaaatagttatcggtgagaaatttcacatccaacatcgacgccgaacagatatccagcttcccaccctttagccatcatagccttggccaccagaaccatcgttggagagattttcgggaggatttcccggttgaaccactcttcaaagttttcatcgaactcaaactcttccattagccacgccccttaggtaaactcagtggatcggtatcttctggacttggtgcttcgcttaggcctagagcataacgttgagcatatttaagcattaaaatatccttagcgcagtcatggatactatcatgcgcgataaacccgtcgagcgtaccctttggaagaggagtagttgtcagcccacgagtcagaagcagcgattcaattgcagtacgaatatcacgttgattccagaacttgcacggttcttctttaaatgtatcaatttcttcttcggaaattccttgggctcgttgaacatcgcgaagacaatcaacaaaaatcggaaagtcaaagctctgcccacggcaccaaccaaaggaatcccatggatgaattccattatcaatcagatattgctgagcttctttaattccagcaattactgataaatcgtctggcgttgaggccaggttagcacgggcctcagctgattgtttcttccaccactcaagagtagacttaccaaacaaccgatgacctttctgggatttaaggtcaaacttgatgcgatgaccacgtttaaccaattcatcgaagctttccagaacttcagggtcagaatcaaaggtgattagagcaaggtcaatcacagaagagcttgacacatttccgaatgtttcaaaatcaataataaagtctttagccattttgagcctctagcataaatttaatttcgcgtaactggcaaccaatatattcgctcagatacacctttgggtcatatcctgtgaaccaagtaatagcattagcattatctgctatatcacgaagctcattcagaactgtatcaattttaatgttaatagcacgcttaacattatccggtgcttcaaacttagattcttgtaagccaacaatcattgtttgaaggtcttctaatttcaattcaaacatattacctcacacatagaatacatcataacgaccacgagtagtaccaacatataataactgttgcgcgagagaagcatctgccatgtgaatgcatggagtataaatgaagcttctgtcaattgagatgccctgggccttatggaaagtcgaagctggtaatgctttcactttatgaaacttacgcttagcatcccagaactcagaccaaggagctttacctcctttattccaattcttatatgtatctgcagtttttgccaaaaagaattgaaacttgttcatttcttcttcggatgagatgacacagattttctctctagcgtactcttcatcgtcgccataggtttcaatatctaatacccaatgacgaaccagatattcacccggaacacctctggcacccaaaaatgatgtggtttcaactgcatctaatatgcgaacaaactgaccattattgaaaagaatttcgctgaatttctttccttcaaatttaagttccttggtaagaggttcttgcataacaacaatctcacctactacgaatggccgttcagtttcgtatattcttcgtctgattatttcattcaatttatcaacagatttattagtgaacgcaagcattcggttttcaaataaatcttctggtgttttaactaaattaaaataatttagcataaaatctttaagggcagttcctttcgtaaacccacggacaccatgaccatcaactacacagtcgcgaatccatccaccgtttctgatttcagtagcaacttcaatgattggagcattactccgcatcacctcggtcaaatgaagttgtaagaaatctttatgagtgaagaatggactcagtgcaggttcattacttccgggttctaccggacgtatctgagccttatcaccaatggcaatgacaatacaccaggcaggaatagttgccatcaaaatcttaaacagcttacggtcatacattgaagcttcatcacagataagaactcgaatagatgccatatccggaactttcttttgttcaaacagaacgttttcttcatatgtcgtcgggttaattttcagaagactatgaatagtactggcctgcattccgctgagcttagataaaacctttttggccccatgtgtaggtgctgccagcgcaatgccagagataccctgagaaatcaaagcatcaatgataaatttggttaaagttgttttacctgtaccggcaggtccattaatcgtaatatgttgacctttagctccttgtttgaccatttcaataactttattaaaaatcgctttttgactttcttttaattggtcaaacgtaatcatgccacttttaccctcactacatgcagatttttaatttttgctttgagtttttcacgctcaacatcactaagcggttcatacaccagctcagatgttttccaccaaagcatccctttggttttgcttttcccagtaaaattcccctttgccaatttgtctgttaaaaccgacattgtacgaatccgtgctttattagccgattcttcattagtgaagactacacatcgttctccatcatacatatcagttgtgactggatggtcaaatccgtctttatccttatacgctactacatatccatagtgttgcattacattttacctctcaaaagttggaagaaggacgcagtcaatggaagaccttttttcaattttaacttatctaacattgagcatttttctaaccgacgaagtgagctaacaattagccgtattgattgtacacggatttcagcatctgatggacgattcggaactgatgctaaaatagcagataacttacgctcaactttagctaattcagacttaccaccgctgatacgagttctcaatgcattaataagttctaaatctgccgaggttgcagttccattcttttctttttgcacaaattgagaaagatgattttcgcgattacgtaagttagttttaattgatgtgatagttttttcatactcacgaatcttttccaaacgagaagcttctttatcacttgttggcttaacagaatctgaagaacgaactatgcgtgccgcaatttcattcgcttttcgttcaaggccttcaatcgtattatttccacgcaaagtattatacttttgcttaacaggaataacattccctactacatatcccaagtcattattccagcgttcaagcgtcatgctgtcaggatggtttcctttgacggttccaaacttttcgcctgagtatgcgcagtgtgtctgctgcatgatgttaaacagatattctggggtgagattgaactccttgtgccgacgttgagcagaacctaaagttgtaattaaacgagtataaactttagcggtttcagcagtgaatttcattatgttttcctcaaaaatgctttcgtcttacggacggtataatgggtctaggtccctagttctagataatcactagttgactaagctatagtaacactaaagtagtccataagtaaaccagatttttcaactttgttatgacccaccactttgaacttagttcccatcggtagcatcctttcttgttctttatcaatcatctcgatgtcagcgcttctgcgctgagcaatgttatcaatcacatcatttggtcgcatgaattcagaatctggtgcagtaattaaaagcgatttcatgttggtatgataatcaaatgattgatggcaattattgacttcaatgactacaaaggtcgaataatgccatttgcctgcaaactctcgggcgattgtttcatctgttgtgaatgacgccacctttccaaagtcaaattgctctcctttaataagagcttcataaaaggctttagcctcacggcatgatagacctctatagagaatgtctctgttatcaatttgatggcgcctaacgatagagtcaagtttcttatgaaattcttcgccaatcttattgttcatgcactgccacagaattgactgttctttgcagtcaaaacgattggctaatgcttcccatacgcttaaatcatataaaggtaatcctttgctttctcgcgcgaagttaagaacatcaatggaacgaatgggttcttcgataggaataacctttgataattttactgaaatagatgggtttaatgaaatagccatgatattctccattttggttacgagaggtatcatatcatggctttttagaagagtaaactactttatgaaattattttgcccacggagaccagggcggcgggtcagaccagattgaagccagttcgtctagaagagcttctggggctttaataccatacttctgtataattatacggtattcgtctttgatgtccttagaaatcactggatgaacttgaacctcttcctgaggctcttccatcatttcaaacaaatccatcacatgaaccactccatccgacgatattgactgttactattattatatgcatcagcagctttttgaagcaaatcgctcggagtaaatctggcgaaatcagcttgcataaatgaccatactaactgagtaaatactataaaagcgtcttcattgtcaatgacgatacttttgccgttaacgattttatcatttgcatattcaaacagatcggtctcatgatatgcattggtatatcctttaaggtgtaaagcacctaaaatattaattggacttcctggcatgtgtgaaacatcaaaagtatgggctgttttgacaagtccatatttactattaggacaccacccgcgtgcttcaaatttattgaccagttctttaaactcgtcataagaataattgtaaattgctacagtgaatactttatcagaatcaaaaccttcttttagtttgcgctgtaaacttactttatagatttttgcgtcggccacacatagctccttcagtcatgttgttgtcttcaaaccacttatcatttgctttaattaaagcaggcgcagcttttagtaataacgctgcagctcttacacctctgtaccaacaatcaaaatgagacttctttaatggtgattgataccagggcttagtataacatatcattttgttctcctcagttagtaggaataatatactattcccagtatagcataaaaggactcccggaggagtccttaatttttatacttctgcactagcttcaaacattttagcgttggtggttgcccaagttgcagcatcatcaactactgttgaataagcagctttttcagatgggaaaatctgatactgtgcgttagcaatgcgatgtgaatcagaatacaccttaaaagctacagatacttcagtacctttaacttcgccatcagcagtggtatggtcaaaagttttgatatttacgtaagccattttaatctcctatttagtttacaggagtatttatatagctgcggtaagcacctttaatatttctttatcaatttctcgagtgatttcttctcgaagggccaatactaaggccctttctttttgctttctgataatttttaaacgacgcttagatattcttttagccattagtagcctgcatcttgacgagcaaagttctcagcgtttttcagataatacagtttaaagatttcttcagaatccagaccaagcgccataaacatattcagaacaaagtgcaggatatcaatcatttcaaatttgatttcaagctggtctttatcagacaggtctttgatataagtttcctgcatcttgacgtggtcagctttccatggtttccacacagcactagctgccttttcaccattactcataccgccaagagatgtcagaagttcgcggaattcgtcatcaatgtaatctttttgattacgcagccactgcacgatatcaccggcttgagccaattcatcaggatgcatgttagtaccaggcttgtcatttgcaagacgaacctgaagagatttttgcatatcaagcattacttgcagagggtcaccaccaactttgcgtacgatacctgcgtatcgagcttcagctttatctgcaccagcgatcagttgactacattcgttaaagtgtgccattattttattcctttcaattaaattagataaatattatatcacttaacataaatagcaggaggattcatgtctgaagtgaaacaagaatgtaaagacaaaggaggatttggaagatatctttacgtcggaatcgccactgctgctttagctgcatggaattatgtggtagttccattagctagcacacatgggctagttcttcctccaatgccgttagaaaaagttgtgtcgtttattatgactggaggattgctttaatttaaggggctttggcccctatatcttcgcatatttgtcaagacgtaatttagccattaaaccttgcgatatattttgattaatataatccgttatttcagaagcagttgccccctctttcataatcatatcatttatatctttgcttttccaaggcgacttatcccagaaaactaccttttcaccagcatctactaaacgtttcatacgcttaattgtatcgggatgacgaggttcatggtccataatccacgctcggttatcatggcatggaacttgagctaaatctaaagacccaccagttattgcaatagcattatcaatgaacaacgaatctattggtccttccatgacgaatacgagttttgactcatcaatagtgtcgagaccataaattttggtcgcgtgttcatgggctttgattgtgatgtatttttgtggagcattctttcgtagtgctcgtccttgaaacgactcaatctctcctttcttgttgaagataggaataaccaaacgtggttcgttcgtctcattcttataggttcctggattaacggagttaacaagagaaggccattggttagtaaaccataaccttttccaagaagtgcttggaatacatctggcagtcacgtatttaactatcggatgttccttaggaagtctatctaatcgctcgcagaaattaagtttttctattacggggagttttgcattaattttctcagacggttctacagtctttggcttatcaaagacctgctcctttcttttctcaagaagatactctcgatagaggtcaggttcattatctttaagatactgcgatagccacttgttatactcacagttgaagcaatggcagcgtaatccttgacctgcatcaaaaatccagaatcgggctttattgatatctttctgtgagtcaccacaaattgggcaacgacagtttaacttgaatgttgaagatgtagtaacgtgtctaaatttaggtaggtgagatattgcacgaattgcatactcgttatcaacccaagacataatatttcctctggccttaaactaataaggccattttatcactttttcttggcagcatctttatctgctttccgtttctttggaagggtttcgggtcctttattgacaatgtccccggaagtggtacctgatgcaatattttgtgggctgccgcctgcatcaccagcgaccatttcagtaacaaactctttgtatgttttcatagagcctcctactatttattcatgcgtaatacgtaagcatttatatgtaggatacagcgtcggagacattgattttggattgtctttgataagcataaactgcttgcctgtatcttcacacttttgcttaattactgcttcatctttaccagtgaatgccatcttttcaatagacattcctccagaaccagtagatagcgccattactaaaacgtatgtaatcatcctaaaatccacttaacaatgttgaagttatcaaactgggcatcacagtaaagaacataattcaacttaagtgctgcgccgtcgtctttaagttctgcctgcacttctgattgtttgctcgggtctacgttttccacaatatgaccaacatctgcacgaatctgctgagctacttcggactcatcagcagtcattgaccactcgcataagtctttatcatagttggccattgcaggaactgcagagcaacttgatactgcgaacactaaagcaagtacaatctttttcattttggtttcctcaagcagcttgtacgttaagagcagaaatcaggcgataatcaccgtttgcgtatactaacattgacacattgccatcagtgtttttgaatggctcaacaactactaaaacggtatcgccttcatctaatgcttttcgtactacgccatcacaacgcagattagcatgtggagatttaactactttgcttccaactaccataccacaatgcggtacagtttccgctgattcatctttactcttaaagactacgtctaatgctttttcaattgtccacatgatgttttcctctactcgttttgtttcagtaaggccatagtatcatggcctttgaagaaagtaaactaccttttgaacaattttttcaacaaaatgtcagaggtcagattcttggtgggtagatatgttgccgagttgacccagatgccatcgctgttatacaccttgacctctccatagtcgcatacagataggtctgctttgttatatgcctcaatgcctcgatgaatggtatctgtggctgttacaacaaaagagtgacctgactggtcacggaccgcgctaaacacaaaaatcataaaatttacctagaattttaactcttctgccagagcatcaagcttagaacgtgatactcgttcttgacgattagattcggctacacggttctgtgcacctgcaccttctcggacggtattgcttggattaggcttagttgggtcgttttgctgctcaatttctacccaacgctgattagccttatgtacacccataaagaacttgttgttgatgttcttatcgccataacgtgatttaatctgcttaattaactgttgcttcatctgagcaagttcaggggtttcaatcacagccagcataaagtctgccgtagcaggtagacccgcagattctgcaatatcactcatgtccatatcagaagcatcccaagctgaacgacctacctgagccgcggtccaaagaacagtttcagattctacagccaatgcacgaagttcttctgcaatagctttaactaacgtgtaactgttttcagtatattgacgaatacgacaagaagcacaaataccaagatagtcaatgatgataacagtcggtttaaagttcttcttgagtttcaattcatttagaagagctcggaatgtattagcgttagcaccgccagtcggatactgtttaatgattaaacgaccaagagtactagaactacgccatttttccattttgcctttatattcggcgtatgatacacaaccatcgtcaatatcatcaagtgatacatcgagcaaattagcatcaatacgtttagcacaaacttcttcggccatttccatggaaatataaaggacgttatgccccatctgaagatagtctgcagccaatgaacacaatcctaacgatttaccaacgttgacgccagccatcaatacgttcagtgtaccagtctcggcaccacctttagtaattttgttcagaatgctaagtttaaacggaactttacgagctttattctggtatgataaccaacgagcttcgtaatcttccatccaatcatgaccaatatagctatcaaacgatactgataacgcttcgcgcatgatatcaggaatagccccaatatcaggaagacgcttatctcgcttatttggctcaagctgggcattagtctgaatttcaataattcgagacgttgcgttgtacatagccttttcttgaacgtacttttcagtttccttaactaaccaattcaaatcttcaggagcatcagataacttatcaataagtttctttgcgccttcatgttccgtttcagttatagacgaattatccagtgctacacacaacgcagtctttgaaggaattgctgtatattcattaacatgcttcttaattatgttaaacaccgtctgagcaggtccttgctcgaagtactctttgtccatatatggccaaaccttcgtaaagaaagcctggttgtaaatcagattagctaagattgtttctaccactttaacctcttaaaagattttccataatgattttttcttggtctttaatgcactctggatttgttgtttaacacaagcttccacatgaggataaagttcatccttatgagcttcagatggagtactaaactcaatagttacttcccccgaaggagaaatatttaatttatgaacataaaccaagtgtgattgaccatttaattttatcacaatttcttggataacagtcttcatagcttcttggattatttcatggcttttcttgaacactcgttcttgacgctcgaagtctccctcttccgagggagattcttgttcaaatttctcgagttcagattctaaatcaaactcagtcttcattcatgaagttctctaattcatcttcaacttcagcagctgatactgaaccactctcagggagtttaacaccatcaaccttagttgaaacttttgagttaatcatttctgctaccgcttcatcaaccgcagcgtttgaatcaatagcacccaactgatagcgagctttgatagcgtcacggaatggctcgtgcttaaacagaggaccccaaaattccgtactgctcgtatcttttgcccgccaggatttttcttcacgaatcatctcaccggtttcaacatccaggaattctcgtgcgtaccatccatttttcggtttaaccacaaacccgatatccagagccatatcaagcagaccactgtatggatcgataccgccatcgaatttaacatcgatgaagaacttacttttctctttgacagtacgtgatttctcggcgttcaggacaaactgatatccctcaagctcagtaccatctttaatttgacgtttaccgatgatgaacacagtatctgcagaatacataggacctgtaccaccagtcattaccgtcttactgaacatctcgatggtctcgattgtatggttaaccgcaacgcaaggaatgttcttaatagagaagtaaggagttacgatacggaagagagacttcagacttttcgcacgagtcatatctgcaacagatttctcgttcagagcatcttcagtttcctttttagacgccatgttaccaattgagtcgataaacacgatgactttttcaccacgctcaatagcttcaagctggttaaccatatcgatttttaattgttcaaccgactgaaccggtgtatgaattacacggtcagggtcaacacccatagatttcagataagctggagtgataccaaattctgaatcatagaacaaacagactgcatcaggatacttattaagataagcactaaccattgtcagagacatgttagatttgaagtgtttagatggacctgcgaagatagtcaacccggactgcataccaccatccaacgctccactgattgcgatattaagcatcggaattttagttctaactacatctttctcgttaaagaattttgatttagtcagttctgctgtcattttagaagtggatgctttaatcaggcgagattttaagtcagacattcattatattccataagtctccattatatttttctcacaggttaaaggatagagtaattatattactttgttcttgaagctattaacagaagttccatttcttcttggtgttataaaccactgtttccgtatctatttcatagtgtattttacatccaacgcacatgccatgccaccagcaatgcattccatctgagccagtagttccttcatgaacaaactcatcagatttacatacgaagcatctgaattcttcagccttgaatatgttaccagctacatcagatttattatagatgttcataagaggtccttggagggctttcgccctcacagatatggttctaccttaccaaactcatggaaggcctgagatttcactcgagtgttaatacacatacgaattgattttagaggttcgtcatcaccgaataaaccacgtctttcaccatctttagatttccaacgggcttgatttgggaaagcagcatgtagttgttcaagggctctattctgacgagcagtatcacgctgtgtagagcaaccgccaggagactgcactttgccggatttaacgagatacttaaacagagccagatgaggatgacccatgttaatcaattttagaaaagcataagcatcttcgttaaggtcaataactccgtaaccaatatcttctgcggtgagtttagtcaaatcgtagaaagtattcgtgaacccaaaactattctcgcgataatgcccccagcttgatgtaattttgaaaatcggcaagcgagcatgaccgtgataataaccacaatccatagcagtctcgacatatttgaccatatcatcaaatacttcttggctcattgcctcgccgacaccaagcggaacacggcgatcgtcgcgttcacgaatttcagtcagatgaattgtcgtatcatcatcaagcatccaaattcgctgccctgcatacatttcagtaatcagacggcgagtaccagcgattccatcaacatcatcgggaatagtaacaattttagcagcatgaccatgccaggtttcgtatgcttctttttctgattcacgtactacaagatgtggaacataaccttcaggaaacatagtcagggcagtaactgccccggcgcgcttataacttggaattacaaactgaatcataatgtacatcctcttttatttggtccatgcctatcatagcgacttggaactattcttttgtggcaatatatacagtaaagttctattctctttggtgatattctaccacgcaatgtattagcaattttatttctactttcttctgaaagctttcttccaatcaatccatttgaaatgtttttgcatctttcttcgctaaagacgaatttcatcccctttgttggagacgctcgtcctttaagtttagatgatactttactataatcaatttttgatattctagctttaatatgctctgttgattgcttatatccagatatcgttcttccatttaaccactgggcagaaagagtattaaacgcttgcgcatcttcatatcttccatatttttcatacaattccagatgtgccttagcatgctcttccggagtaagatatacgatattatcatcgtcatctgttcctccagcgtgttttggaattatatgatgacgatgatatccagacttacgtggaatcacttccactcacctttataatctttctttgcaatgtgggtttcacccgtgtgagcataattatctacgagatagaaatgtcgagaatatacgtgcaaagacccgacgttccaaataatgtcgccaactgaataatttttacctgatgcattcagaagtttggttaactgttccagaacatagagctgccacgcatagtcattacgatatccaaagacgacatcgtttgagcgcatatttaccacagcgtgaactttattgtcacgaataagatattgtacattgttagtacacatgaaatcactcataccatcacgctcaaaatcatactgcatttgaggtcgtgtgtaaatcataattccacggcgagaatcaggattactgataagttcttttgcacagttagcaaactgtgaatagttttgtgatgaccaaactgcccagccatagttagaattaatctcaccatgcttggatgcaattgctttccaaatagctggagtttcaccaggaatatctttaacgaataaactttgagatttataccactcaagttcccgagcaatatatccatcattaactgcgccaaaaatcaggttttcatctgcaataaatgatgcacctacgatttcaatagtcttcacacccgtcttatcaatcacaaattctttgttaagcaaagcatcagcgaattcttgacggatatcttgtactgtcattggagttacaatcatgagacctcttatttaacttgctggataataattgtattctgctgtgcattagaagcagaccaaatcagcgcaattaaccaaccgataatggaccaaccgaatactagatttgtgataaagattccaccccgtgatttatgcttacgactgcaagctacaaaggtcggcaaaaaatagatgaagaaaagaatgattaaaccaaatactgcttccattttaatttcctcagttagacatgcatttgttgtagatgtgattttggagagattttaactgctccatacgttgtttatgctcattataactcaacccgccattagcaaaatcagttaaacgaatctggtcattcactgctgccgcttgagcagtgcatgtacgttctttttgagttttacgcagacgcttaatttcttccagctcatgcttattctgctcaatcatgtcaagttccatcgcagacagctgacgattaggattagctttttctttcgccaaccgacgctcaaccgcgagcgattcagcagagacctggttgctagcacgatagtatcctacagtaccgccaattgctcgcacctgtccaacagaagaagccgggacgatatcaccttgtggcatttgacaaccagtcagcgtgagagcaacgataacagcaagtaacgatttcattgtaatctcctcagtatgttatttcgagaaccatggtaccacatccttgtggtaaagtaaacaactttttaaaaatcgaacatatcaagaagagacgatttctcttcatagtctaaccctgccgcttcagacatacccgtcagaggtttaacgaacgatttttggaacagaacactgtggtcaagccacactagaacttcctgtcggatttcttgtggcagctcagtgccagatggccatgccatgcatttctcgccgtacgggttaccttcacgcagcgggatgaccatcaccttctcgccttccatgattggtgttataccttcaaatcctgcggttgctcggttatatgccaaagcgcctttaacgtgatacggcgtacctttatctggatatcctgcaccatcatcatacttaccgatgttgttggcagtcttaacttcggcgattactttatagtcaagctcacgatactcagactcaaactgcttataatattgttgtaaagattcttcaccttcttgcagcatacgacgaatagattcttccaatgcgttttgaacagcagttggtgtagaactttgctgagtttccatacccataattttcagatgcggttctgcataacgtgtaccttccatatcatacacgttcagagcatatcgtttcttcgctttccaaaatccgccaatgccgtttgaccccaacggaggacaagaaatagcttcacggtccatgaacattaaatgttctttgttgttcatgtattcacacatctcacgatatgattggtcaatccaaggttccattttcttcttaccgaattggttcaggaattctaccaaatcgttagtttctttgaaacgctcaagacctactttctcaataaccttatcaacacaaacgtaaattgagtcagtatcaccggctactacaaacgaatgtccttcagtaccgcataccttgttgaggtattcattaactttacgttcaatccattggattgccatttgaccaaacaaggtgattgctgatgcgttacgtaaatcataataacggaagtaaatgttacccaatgcaccataaagggagttgatcagaatcttacggtttaactggttagtattacccaagatttcagcatgtttacattcaaacatcagtttgtcaagacactcttcggtatatgtcagcagttctgctttcatatcatcagagaaatcttcatagacattaacttctgcgaatttatcgatagttccaaacttcttatcattcagaacctttttaatcagttcttgatttcgtttggcacccatcattttatttttccactctttacgctgataaaataccttcgcgatttcaactggaatgacaccatctacatctttacgatacatccaaccatttggtgaacatgaatattcatcagatggacgaggagcagtcttgttaatgtactcacccaacggatgaagtttaaactgtccaacgatagtttctggtgaaatattgacctgtcggataattgacggatacagagatgtcaagtcaaacgacatgatataacggtatgcagcaggaactggttccttaacatacgcaccaggatacgactgtttaacatgagaacgactttgcggaataaccttgtcttgttctttcagactgttaaagatgattgcgtcccatgttttaattggactcattacaccttgatatggcatcttcgcataataagacattgagattgccaggtcaataaatccacgaaccgcatcaatcgcttgtactgattcaacgtcgatgatgttatacgaaatataccgttggtggttagtttcacgcaacttattgatcggaccatcatatgctaatttacctttcttggtttcataataagcaatgaaatccaacttatacgtcggttggttcgtgaaactaaatttcttatacaaatccatgtaatcaagaatagtcacacccatgatagaataaatttctttatcaccatacatgtttgttataatcttagatgaaactttattcagaggagagaaccgtttcatcgtacgctcaccaagaatctgtttcacacgattcatgatgtacggaatatcaaatccttcaatgttccatccagtaaagattgctgggcatttctgttcccaaagattgatgtactcaagcatcatttctttttctgaattgaacggcatatacaccacgcgatcaagaatatgttgcggaacttcatcaccaccctcagaatctaaacgagcagcgagtttcttgtcccactcggaaacagaaccataaagcgaatgcagtaaatcaaacacatagaacttatcatcaatcgaatcatagtgagtgatagcatcaatttcatattctgctttcatcgggtctgggaattgagatgctgtaacctcaatgtcacagtttgcgattcggatgaattttttattataaacgatttctgaaccgtaagtatcactgatatacgcgagtttgaaatcatccatacccattgcttccattcccatatcttccatacgacgcatccaatcgcgtgcatctttcatagttgggaatgtattcttcttgcaatactttccgtagatgtctttgtactttgtttcttccatgcaatgactaaacataacaggagaatatggaacacgacgcatgcgttcctcaccagtagaatcgatataacgttctacaatgtcattgcctagagattcaacgctaatataaaattctttcatgggtttcctttgtttatagaccgagttattagtctttaggtgggataattatactccgatttttataaagtaaaagggccgaagcccttttcttacgcaccgattgtgtacttagattttaaagtccattcatgcttctgcttgaatgtaattactcggaagttattctgcatctgtgcaagagtttgaccacgattaatacttaatagaccccaatctgcaagcagttgggcaattgaatctcgacggatttcatcttccaggtcaataataacaggacgtccatcaagcttcaacatttctttaaaatgtacaatatagtaacgaccttgtttctggagaatgtggcagctttgatatagtaccttatctttgttattagcaattcccatacgagtcagagtttctttaactttcaggaagtcttcaggctgtttcagtgtaatttcaatcatctttaccattccaatgctgttttcttaagagttttctgttctttcacgtttttcgtgattgtcttgaccaattcatcagtcacaagacctttcattttcttgagagcaggtttaagtttatttttggcttccagagtctctctatacatcctagcatcaatcgcattgaccttgtaatatgtcattataacttgaagaatcaatgcatcctggatgttttctgttaacttagcccatttcccataccgacgacctctaggaacagaggccatcatatagttatagtgtgcttggtcagacagtccttgaccaacaaggttcataacataaacagcaggcatacagtcagcatgctgagaaagagcgttttcaaccatgaattttgaataatccatagtcgagatgttcaaatgctctttcttttcattaatagaaccgataatctcgaagaattgattttctgccttttctttatatgaatcagataattcctggactttcgcccagtctttacctaaccacgcgatttggtgctcattatactgatcatcatcttcaaataaactcatcatttccactgcatctctacaacaagttgaataagcatataaaccaaatgtaattcaatcgaagctgctacaccatgatactggttattttcaccaatgatttcatacattcggataatacttgggccagtaaccattgtatacagttccgaagaaagtttatctacgaaccaagtatagtctgcagcatatttcggagcaagagcacgaagttctttgatgttcttggttttaatagcttcaatgacatcttcaattgagccgcggtcatttagaacaatagacaagatacctgcatcaatcacacccttagaagaataatgatcaagcatgttgatggtcttacggaattctggaaaattctttttgaccaaagcagctacaactttcttatcttcaaccaccacgccttcattttcacaaattgcgagacaacgcttgagcatctcgatttgcattggcttaacatcagatggagatggtttaccaaaattaattacacggcaacgagactgaagaggtttaatgataccatcaagattgtttgcagtaatgataatagtacagtttgtgctatacgcttccatgaatgaacgcagatgtcgttgggattctgcaagacctgctcggtcgaattcatcaatcacgataattttctgcttacctgcaatggatgcagaacttgcgaatgcggttaacggtccacgaacgaaatcaattttacaatcagaaccattcacgaacatcatttcagcattaatgtcattacataatgctttagctactgtggtcttaccggtgcctggagaagtactatggagaattaaatgaggaatttttcctttagctactaaagccgaaaaaatttctttatcttcagcaggcaatacacactcagaaatagtacctggacgatatttctgttcccacataaagtctgcttcgtttactgtcaatttcatttatatttcctcattcagattaaagatggggccgaagccccgaatttattactcaaagtcaaaggtactatctgcttccattgctaccacataagaggctgatgcaccttcaaattttgctgcagtctgtttcttagcaccgttcatttttgcccacagcatcagcttgtaatcaccaacagtcattttcatattgctcatgttgatgatgaagttgaagttaccttcgccatcataatcaccgagcgtcagagaatacttcggacgagtcagtgcagcgtcttctactttattataaccacgcagaacaattttaccatcaacgttggtgatagcaattgtgtcaatctgcataccacgagacactcgcatcagttgctgcaggtcttcacctttaaaatcaataattacgtttgccaccgggaatgggattggtttagtcggaaacacgattgtgctcgggtcagctgctggccagaagatagttgagcgagcatctttaattgccagattaccatcttcctgcatgataatatctgcatcatcaccaaccagagacagaatgctcaggaaactgttcaggtcataaattgctacatcagtatcgatagtatcagagattgtggcttcagcataagtcgtaccgttaacagcacgagtcatgataaaattgccaggtttcagcatgataccagagttgatggtggagaagtttttcagaatattcagagtttctttagagaatttcatttcaataccttttaattaagttcaggataattatatcaagctgcgaatgtagcagttaattcttctgcaacaatctgacctgccgcaacgagttgctcatcagcatctacgcagtaatcattttctagacgttcgccaccatgacggtcagtaacaattttagcaccagccttgattgattcgttgtaatgcttacgcatcaattcaatccatttttctgcaacttcgtcgtcaatagatttatagaaagcaaagcgagcttcagaatctttaatcttatctttaataactgctttagtttcttcagttagagccagaacccaagatttacgaatacgattttggttattcgggttggagtctgcacgtacgtttttaacctggatatctttcacatcaacaaaattaatcattatatttaccttaatcgtaataatcttcaaccatccaaccgggattcctgctggacatgactctattatattcatttcctgtaaaagcatctcgtaacatttcttctgttactaagtgcttttcatcagaaaacaaattagttaacacatatcgctttacttcaggaaaggccagcagatgctggccagttgtaaactcattcattccatcaccgtgaatcgtccgaccttcttcatttgaaggtgttggccatatgcctgcgggtcatggtcacggtgagaaataataaacacattagcatctaccatcttattcagaatagcagttattgccttaacaccttctgcgtcggtagccgagtcgtagacttcgtcaaggaacagacagtttattttaacaccagaaaccttttcagcaatatcacgccacgtgaatagtaatgctatatcaattcgagctttttcaccttgactaaacgaggcataactaaactcttctcgtccacgagatttaatcgtttcagagaactcttcgtttaacgtaaacgaatagtcagcttccataatttttaggtagctattaatttgcttattgaacatcgggatgtacttcttgatgatagctcctttaataccggagtctttcagcatttcagttaaaatacctcgacgatatttttccataaccaaattagttttgacgaggataattttatctaattcttcttgtagcagttcaatcttgtcagagttatcaatgaactcctgtgatgctttatcaattgctgctttaatacgacgtgctttatcaactgcagttaaagtcatctgcttcaaattactcatttgatttttgatgtctcttgcacgcgtacgaatagtattatactcgcgagctagttcatccagttcactctggcgcgtctttaactcgccaagaatggtattacattcttcaacatgatgattaatcttagtgattagagtgtcattagaatgcaaatcctgcaagcacgttgggcaatgaccacctttatcatacaacccaagaacctttgagtatgattcaattttagaacgaatcttaaaggttttaccttgaacttcttgaattgactctgctgggtcatcaccaatcacgagttcaagcagttcgctttgaagagtttctaattctgctttatatcctcgtgcctctttcacttgctcatcatacatcgcctgcaggcgagctacgttatcaccagaaagtttcttctgcttttctgcgtactcatgatgagttttaatttcattggttaatgcttcacgacgaacatcattaacttgaatctgctggttaatttctctgatttgggttttattcagtttgtccatatcagccaggagagacacctcaagtaggtcttcaacgagcttacgtctattcccagtggacaatcccatgaatggagtatatccggcagttcctagcacaacaatttgcttaaatgatgagtatgacattccgataaggctttcaaagtatgattggaaatcctttgaacttgcagcctcatcaagcttgtttccgtctcgtaaaatttcaaagacgtttggtttctgtcctcgctttatgtagaaactatggccgtcatactccatccataattctactacagagtccttcttattaaaggagttaattaattgacctttcttaatatcacgaaatggttttccaaatagggcaaaggtgatggcttcaagcatagtacttttacctccaccattcttgcccgtgattaaggtcttttggcatttatcaagttgaatgtcaatagccgcctgaccaactgacattatattcttatatttgacacgatttagtttaaaagtcttcactgattttgtgcctcaatatataactgtttagacataacttttaaggccttgatgtcatctttggacaggtcttcaagtgcttggatatattcttccattaaatccaataagcttttaacttctacttcttcaccgtcttcagactcgaccgagttatctaccttagaaacagttcttaattcatggactactttttcgagttcggattcaaactttggaagattttcatctactgcagtaacaataattcgcactgcaagatttctgaactcttcaaaatcaacttgccctgtgacaggataaattaattttctatgccatgtgatttcattagggacgaaatcaaaggttgataatccagtgtcttgaacccagaatccgcgtgggtcgttctcatcacccgctgtaagcgtccaaggcgttccgatgtacttaacgtttgctgcgcttgagatggtgtggaagtgtccagaccaaacttgcttgtactttttgaggaaatctggttccaacccatgagatttcatacctttataaaaatagaagccattaagctcccagtgaccaatgcagtattcagcagacgattctttgatatgcttcataatttccgatgcgttctcttcacacatccatgggcacaagtcaatcaaagtcccatcaaaatccatagtcgtaggtttatcaatcaccgtgatatggtcatacttaccaagaatttcagttgatgcattgggtgtcaacgtattcttgtagtgcatatcatggttgcctacaatagtgattaaattaattccttctccttcaagggattcagcaatttcacgagcaaattccattgtcttatgagtaatggctttgcgaacgtcaaaaatatcaccatactgaatccaagtagtgatttcattttcttttgaatattcaatcgcctgttgaattccatgacgttgaacgtcttgaacccatgggtcatcgttgcggacacctaagtgccaatctccagtatgtagaattttcatataacctctctaatagagtttaattttatattattccgtgaatagcaaaaagggcccgaaggcccattacttattttgtcattaactcaaattgttctttaaagcaatgctcagaatcttggtgttctaccaggaattcaaatgctttatttcgctctttatcatagagcttccggtcagatgacagatgtttcattcgttcaaagacttcatttttattttcatcattcaaccacaaaatgccagaatcatgagaagtcaacggctttccatcaacccggaatttcaaagcatcaccagtagctttatggaacacaggaatagttccgcaagcacctaattccaagtgggtatattccagtgagcgctcgagaaatttgtctggaagacgtgacaactgatagccaaatccagactgagacatacgctcaagcatttcagagttaacatatcggtcaagaacttgaggattcagacctggtccagttttaatctgatgatagtgacggcaataatcaatttcatagcgttctttgatgttaataaatgcaggactgcgttctaacccttccaagatagtcgttttgcctgcgggccgcagatgactttcatgaaagtcaaacatcaagaaataacctttccatgtagtagtacgaccaatccaacgatggatatcaaaatcaatggcagagaagtctttccaatacttatcacgaattgctttgatgctcatagcaggttgaaagttataaaccggaggagctgagtcagaatcatcaaagaaactcaacccgccgcttggaaaatattcttccattagcacggtgttaaaatcaccgtttgagctatgactaaacaaaacatcggcgcgcttaacagtttcttcaagaccagcgtttctacgcagtgacaacgctctatggtcatgttgatacacgactacccgaacttcaggtttaatgttctctacgagcttcttatagttatcaatcgctgcttctggcgcattaatagccggtactgagttaatgataagaatatcacaagcattgagtaaagacagtgtcttgtcatagtcatctgctaaagacactggaatagttacatctttgtagttatgcgctctattacgtgtaaacgctttatctttagcgtaaatgatatttacttcatggccatgttttactaaccactcacggtgctcgagactgaacttggttacaccgcagccctcaagtccgcgagccattaaaatattaatcttcatatgttgacctttgttgttaattttgaatattttaccattcccgtaataaagcaaaagggccgaagccctttaaattttcttgtatacaacataacccgctgcttcacatatacgcttagcttcttcaaagcgtctaagcatatctaccttagcattatgaatcgcttcataatcgggagcaggtgcttctctccgagcagtatcacatttataacagaagtaactacgctttggtcctgtataacgttctgaacaattactgcatcggcatgtataatttccttccggccaatcatgcccagggttagaacccatcaaattcgtcatacatcccaattctcttcactagtaataaaatcagggtgttcatctaaatcaatgaatccccagttctcttcgtttaccattcataccaccgtttaacctggaaggtgtcaacccagacaagagagttcttatcaattagcttacatccttcggtagagcctaacacgcgatattgattatctgctacctttactgccatcgtaccagtcgcagtgtttaaagtaaatcctgcgtctttacgaacacgtttaaattttacttgtaccagcatttagaatgtcccaaacagatttacgagaggtattccagcaagtcagaataatctcatcattaaaaggttgttttaaaatagtacgcagtttttcaatagcatacttgtaagcagggaaattgttgtctaataccgcgtctccagcatgagcttttaatcgctcaagttcacgacggtttttacgaacaactttgttggctcgagcaatagcttgttcttctgccgcttccattagtttctgttgcagctcgtcgcgctcttcctgggtaatattgttcatgttattcctttggatggtaatttatttcaaatgtgaattcagtatcagtccaattataactatgttcaattatagcagaatctgacctgaaatcagcgtcatgtggatttttcgggtcaatgtgaatatcaagatcaagcacctcccttaaatacatctttagcaaataagggatagcgtctaggtcttgcacatcttctaaaaacccgtcgaggttaatcttcagcctcatataaaaattccagattaggtccatcgcttgtaggttcgctctttttagcagaccctggcgccttataagcggtggattcatactgcgtcattttgtcgtagatgtcctgaataaaggtttcatctgctaacgcaaccatatcatcgtcccgtgaatcatacacgttgtggacaaaatagctgtatttctttgccatttctttgcgttcttttttgatacgctgaacgaatgcattgaaacaagcttgggttatatacgcatgcgggttatcatacttagtttcatcgaagttgattaagcctttaattgcggcttcaatcccgtctgaaatcatttcttgcttccaggattgggtgtatcctgaaaagttgaaacgcttactcagaccttctgcgatcagcataatagcaaggccgatcgtatcgttctgttttactactcgaggaccgccagcagcttcagactcccggcacttctctttccacgcacagattgatttatacagttccttgttatttacataattactcatattgcctcttcgcttcaattaataatatctattataacaaatttgggaagcgagaggattaaagcattacttaatcaattcagcgcatgcaattaatttcatcatgatacgataaaaatcgttatacgtgaaatctaatggaacatcaatgacggcttcaaaatcttcaaatacacgctccattccataaccagcgatatcatctgattcagcataccagtacgttccatcttgtgcaaaagttatttggctattttcaagacagaacacacctttaatattttcatgtgtaagagtcaattgaattttcatagttcacccttcataatacgatagcattggaacagctgttccatgatacgtttgaactcaaccaaactaagttcaaaccactcagattcatctacttcatgcatcatttccatgaatgaagagtataaactttcataatgagtttcatttaacatagaggcatgcgtttcccaatacataccctcttcattgtcaaaccaaacacccatataagaatctatagtaaatccgccaatgccttctactacaatcataatttggtttactttagccatgtcttcaccgagtcaatagcgtcttcaaatttagagaaagcatccacggatgtgtattcattctcaccagagcgttcataaatccaaaacgcgtcaaaatcttcttcaatgatgaattccccgttaggagtttcaatcgtgtttctgccatcaggcgttttagatataaaccatccaagcaaaccaacttctacaatttgttcttcagtcatttagaatttccaccaattgattatagtttaatgcctttccagatgaaatcataacattacaaaatctgtatagtgcttcttttgatactttatacacataatcagaagttgttataatgtatgaaatgcggacaaacgttggagatttttctgctaactcatatgccaattttctagctctaccgatatcatcggcaaacttggtatcagcaagcaaaatactatcaaatacccaacggttagtaaaaatttctgtgtatagaataaccttacgcatcaagatactctcgcagttcctgctcgtttaacccttcttgccacatctctgacggagatggaagttggctgtctagagtggatgaatcaattggaaatactctgataattacgctagtatcttcaccccattgatttgtgagtatccgtttagcttgactaatatcaggctcagaatgagcccggatatacttaatccttctatgccatacaccggtaggaatagatgcgcacacgatatatgaaatcattttgccgccttaaccgctttaacatcgcggaagcctttcttacgttgattcttcatcttacgaatagtgctttcagaaatttcaccgatacccggagtgattggttctacaccaaaggctttgatgccaaattcagacagaagataagcaaccactaattcacggatgcgggctttaccaattttttggccttcttctttcatcgtaccgtgaagctcaacttcccactgatcaagcaaagacggagttacacaacgtccttcttccagcattgcagatactttatcataagcaaaagagttcagtacgtttttgattgcttgggacatattaatttcctcagtaacgattgttttgacagaggagattttaaatcaaatctcctgtagcaaatcaatctttgagagattttatctcttcaagcatatcgtagtattctttactagcaaccggagctacagtacagtggtagctattgaattcatgatatttcacgaagcgttcaagttgccactcaatcagattgttaattcggtgaagcagaaccccctctgaaccgacgtagacaactacttcaaattgaagcccatcccaaattctggtacggacgatatcacctacattaaatgttttcatgcgatgtaccaatgttcgttttgccaagactcacccttgtaccagcgagtcatatcatatccgttctcgtcacggatagcgccattacgcatatagaagtactcgtcatcagtaaaatactcatgcttaacgatacatcctttactcatagcttctagagcttcttgccaatttaaccaattcatattttcctctcgagttaaacggtatgctgttatccgttgatagggctatggtatcactcatcaactagcttgtaaacaactttgtgaaatgaatttaaaataaaagagaggccccataggaacctctaaatgaagggtatagaaatatacagaaggcggtcaagatgaccttagaaaggaactggttaatcttctatgatatctgggtcatgcccagcagcaataagattggctttaaatgttggaatgtcatactgcttgacgttatccataaaaatgacaggataccgaatagcaagcgatggatagcacccgatgcgtttagcaagtgactcaatcaacggacggtcataaaccggctgaccgtcaacctcgttgattacattatagaactcatatggaagttgcagcttactgagcaagtcacgaactgctttacatccagggcatctccaaacttcttcagggatgccatagatttctatcatagttcagccttaatctcagaaatcaatctttcaattaattcaagtttatccgctgtagtcataggataaattttgtcaacagtggcttcttcaagatagcaacggtcagcatcgttaagtatacaccactgatcaaaatcatcagcatctatgctaacgccgttgaaggtcttaactcgttcaacagacccgtcctgtgtcagagctgttaccaaaaatggtttaaacttaaggatgttgtagaattcaacatcctttgacgatgcgttatttaaccatttatcaacagagtcgtctttaaacttgtaccacttatcacaacaaaacaattctatcatttcatgacctgttgaagtttggcagtcagagtattaacacgcttctgaaattcttcattagacagtttttcatctttcttagtaggattaatccagtcagaaataatgatgagaacaataaatggaatagctacgaaagcacctgcggttaatgcaaccagcgcaataacattggaaataaatttacgaatagcattaatgaatttcataattttccttaaatagttaagatgaatgctgtcatagccagaaattctggtccaaacagttcagtagccatgtggttcagagtaaacataattttgtaagtcagcatataaatttcctcaatcatgtgtccaggtagaaccgtttcttacccagagtctttggttatcagaaccacgccaatttttagtggttggcagtgattgctcgtatttcccatcaattataacatcaatgtgttgtagcaaatctaagtctttaatatcttcaaatttatatcctgtccacatccagatatctttctccggaaatcttgctttaacccaagaaactaaatttgaaatctcttcccggttctgtggataaagcgggtctccaccagttaaggtaagaccttggatatacgatttgcttaaatggggtgcaagctctttaacagtattcatagtgaataactggccgtttctagcattccaagtagatttattataacacccttcgcatttatgcaaacacccggtgacaaaaagaacgaccctgcacccagggccattcacaaagtcagaagggtagattctgtcgaaattcattgaaccttacctcattacgtgcttctacttctgcatcatatttccagggttcatcagtttgaatagccccagccgatagtccactttcagggtcacgggttatagcaattcccaacggatgcagaacctctttgttgattttccaaatcaatccccactcgctaagttggttccaatcaacttgcttcattggtttctctaacatgttttaccctatgcataatttctttgttcttaccaagattaaacccacgctcagaaggattaccaagatagccacaagtcctacgaattgtattcatcttctttggatcagtttcaccacaaattgaacacgtgaatccgttttcagtaggtgtcatctcatgagtagaaccacaagaaagacacttatctactggcatattaacaccaaaataatccaacttctcgatagcatagtcccataccgcttcaagaccttcaaggttgcgcttcatgtcaggaagttcaacataagaaatatgaccacctttagcaatagaatgatatggtgcttcacggtcaattttttcaaaaggcgacaggttttcttctactgacacatggaagctattagtgtaccagcctttatcagttacgcccttaacatcaccaaacttagcttggtcaatcttacagaaacgatagcacagactttcagccggagttgagtacagactaaaggcatagccggtttcttccgtccacttgtttagcttagtgttgatgtacttcaggacgagtttaccgcttcctttaaaagtaagcatatcaaattcgtgaatgccaatatatcctaatgaaattgaactacgtccatttttgaatagctcaagaatttcatcatcaggtttcatacgcacaccaaaagcaccttcctggtaaagaataggagcaactgatgcagtaacaccttcaagggatttaattctagttaaaagagcttctttacaaatatcaagacgttcatccagtagtttgaacagtttattactgtcatctgaacttttataatttgcatccagagctatcctagggagattcagtgttactacccctagattattacggccatcaagaacgggtttgccagaagagtctctccaagcaccaaggaaacttctacagcccattggagatacaggagtttctgaaccggtaattgctctattatttcgagcactgatgatatcaggatacatacgtttagctgcgcattctaatgcaagctgcttaatatcatagttcgggtcttctttacgtagattaatgccttcttctacaaacatcacaagctttggaaagattggagtaattccatcgcgtcctaatccacgaatacgattatcaagaatagctcgttgaattaatttttcttcccatgacgtgcccataccaaatgtgatagtcacaaacggagtttggccatttgaactaaacaaagtattcacttcatattcatatgcctggaaagcatcaaatacatctttttctgtttttgaaatagcataatcttttactaatgctacttgatatttgcgtgcatcacgtacatgtttagcgaatgtcttctccacataaggagccaatactaaatcaacattagcaaaggtagttccaccatattggtgagatgctacttgtgcagtgatttgcgccatgatagcagtagctactccaatactcttaggagtttcaatttgagcgttaccaagtttaaagccgttctgcaacatacccttcaaatctaccaaacagcagttagtgaaaggcaaagctggactatagtccatatcatgaaaatggataacaccttctttgtgtgcttccattacagagaaaggaatgacctgattagcgatatgtttagatacgataccagccatcaggtcacgttgggtaggaaaaacacgagaatctttgttagcattctcgtttaagaggtccttgttggttttattaataagtccctggatttctaattcgatattcattttaaactcttacgaagctgcttcttgtattttgaagcaagttgtgattttccatcactttcctcgtatgtaaacccatgcaattccatttcagcaatcatctcaggtttaccaagacgtgaaaagcgtttagccatatcggcaacatattgcgggtgaatattactgtctttacgattctggcggagatagaccagcaaattctctaaccattcgaggtagtcaatatcttgaccttttaaaccagaacggttgaacttatgcttcatttggccttctgccgcattacacaggttacagagcaagcctctgacctttcctgcattgtcaccttctaacgcatggtcatggtcgaggtggttcttttgaatgtcctcatctaaaggacgtttgcagcaaggacataatccgttctgtgcctgatatagtttttctttttcttctttatataacttaccggttaataacatactcttacctcagcgattagataagagtatttatagttaaattaacgagtaactactatatgcattatgattagattctttgatgcagaatgaagtacagaaagcatatatgccttcataatcgtctacagtgaaatcaatgtatgaattagtttcttcatgaagaagactcattttagtccaagccattccattgatgtcatcgtcgtaatagcctccactaaattctactacatcgccaacttcataccaatgactgcgtaaaatttctcttgtaacacgatgaatatcagcgaaattgagaatttttactctaatagttttagtaatgcacgatttagacatggcgaactccaagacgttgttcaagtgcgacaatgtaatccgcagctttttgcattaaatcatactcttctgaatcacaattttcctgtccagcaaaggcgtaaagagctctggtaattggaacgattgcaccttggaaatggttaagtttaatttcagaaatcagaggaacatcttcaccttgaccaatttctttaatttggtgcatcgtatcttcactgtagaagcaccagaaccaagattcgccgtgtggagttgggtcgttaatagtaatgattttatttgtcagtaaatcaataactgcagtgattcctaccagttcaaggtcgtcttcattatctgcagaaataacttgaaacttaaatcccggaatgaacataggaaattgttcgctcagttcatcatcattctcaataacttcaaactgcttaccaataagccccattcactttgtcctcataatcaagcaattcatttatggtaggttcagaggtattataatcctcttcaggaatagcatcttcctctggctcgacagtttcccaacgagccgcataccagggttttagacctttgctactttgcatggtgttggttcagaatcattagcagaatcatgttcaatacgccattcaacttcagtgcgagtaaccactttttcatgacgagtaacgatatctacttcaggaggactataataccaatcagtatgatatgaacctgaacgagattctgataccatgaaatgaacgccgcgtgctggataataccaaatttgagtgcggtcttgatacttatgctcttgtgtccagtctccatcttctactaaaacaaagatttcttctgcatcatcgtctggtgcattaggcggatattcaaaatcgtagttgtcgtcccagccaccagtgacgccagcgatatgcttgatttcttttactaattcagcgttagtcattttaacctcgcagcttctgtaaatcttcatcatcaatccagctttctaaaccggatggaagcgaacattcaatttcccacagcaattcttcaactgcttgcaatcgttcaagctcttctgctgaaatagttaccatgcgtggagcttttaaatcaccgatatcataactcatagttcttcctcatgccaagaacagtcaacttcaaagtctggaccaaggtcttcatcttcccaacgccaagaccctaacggattaccagcatcatcgtaatcaatttcaagaccaatataactccactgaacaccatgaatggtatttccttgctttacaaagaattcaccccattggtgcatgaaagcatactgtggatcagatatagctctttcaatcattgcttcacgaagattacgttctaaatctacttggtcgccttcaagaaaaacaaactcaattgggtatttcataatttcaccatacactcgccgtatttccatttagacataaccttaactccattagagtaagttacctctaccttcgctcggtgattcttaatctgcttaatttcaccagtttccaatccaccgtagccataataaagagctacaatatcaccctcccgaaggagggttccacgataatcatgcattgaatttgaatttacggagttcatcaaaaccgccaatatgtgtaccgtcaggagcaaaaatctgcggcatagttaatccaacttgcgattcacgtcctaaacggcgaagcaaatcactgataaccacttcatcaaatacacctttttctggcattacattgatgaatgcatattcttgtttcttaacatcgagcagacgctttgcattatcgcaaaatacacacttatgaatgctgctgtcgtaaccaaaaaccgtgaacatcttcttctatttccttaaatacttgagcttgaacttggttccaactcgggtgtttatacgctttataaacgttaatcattccaaggcgcttcgtgacttcgccatcaattgcagcttgggcaaaatttcttccacgggtcatagctcctttgagattggaactgttagcaatttgaccagtctcattataataaaccgaatacatgagtagcattactcgttcggcttcttccatatatcgtttacgagccattttcagccttagtagttataactaatgttttaccatctaacgcatcgagaatatctttgatgcaattatctggcattggttgaacgctagctaattgcttggcaatatcatcaggaattcccatgcgtggtatatttaatttgctaaaatcaattttatccattagcagttaccgggaagtgttctgccaatttagcagcaatggcagcgttaatttgatcagcgaaattcttattcattgcgttaacaatgatttcttgaattcggagattagctctttcaatagacatcttaatacgaccttcagcttgcttaacagcgtcatcaatagtttgacgaaccatatcatcaatagcatttttagcgcatgattgggcagcgttacgcatcatctgtgacatttcttctttagcagacatatcattccaaccgcgagtatggaacatctgctgaacttgcttcttaacttctgctcggacatctggaatagtcacagcagcaatattaacttcagattgtactgcttgttttagtttattctgggaatcttttaacaccatttctttaacgatgttattgattactgactgttgcagttgagcacgggctgctgtaccttctgggaataactggcgtactgcataagtatctaatttaatgtcaatcattttacctttttcactccaggaatattagagatagtttcaaatacttcgtcaaagttatctttatcaacagtgactaccatagtacgagcggtctgtttctttttccaacgtttaaagaaagtttcaagactcaaatcatgggaagtgaagaaatcatcggttttgtaaacatatccgctttcaatttttactaccgcatcaggcgaagggtcttcatattcttctacttcaacatcatcaaagagtattaaagtgtcatcatgataatagccttcccagaaggcttcatcgttataaaattctttccaaagcgcgccagtggttttcatttaatcaccttcttccaagcttcgtgagcagcacacgctaatacttcgtcatcagtcaaattgaacttgccttcattacgacgagcaatcatttcattgaattcagtatcagttctaagcatcatgttaagaactgtaaaatccattgtcgctcgaagatattctttaagctgcatagggtcgatgccactttcgtatgcgtcaagaatcatatctgcaatgatgttatcaaagtttttgtcttttatgaggttattagcatactcgacaaaaaacttagtattagcaccagtaatagttttagtaatcattttaattttctctcaaatttatgcttacaagtccggcatttcattttcagaatatcggttgtccaatcaacaagctgtacttgaatactaccacatttttcacaaggcacaacttgtttagctgcagcttctcgacggtctaccatttcaagacaggcatcccagtcaattttaaattcaggtacaggtggatactcaaactcaatttcaaggtcgttatcatcaacgaccatgtcttcttttaattggtttttcacagtaagctccgggcatactcgagagattcataacgctctttgtattcgttaagcgatttaaccaaatctgccatagctaattcatgtttagccaattcagcttctttggtatcaataaaccgcttaaccgattccatttcggcagtaatactattcttagcagtttcaatatgatttactggtgttaatggaagaggtttaacaacattgagatacatatgtgctacatcttcatcaataactggggtggtgctcaatgttttaggaaaaatcttaaatgggtccaaatgcacttcaagaacagatgagttttcaccttgctgtttgcaacatgattttttaactacatccatatgctctaaagcagtacgaacttgcgctaaaagcgcccgagccggatactttccgctggacaaatggctattaatatgaattcgtacagttacattgtcaagctcttcggcacgaatgaatgaaacacccttaggatttctagaactagtagaagatacctggtatttcacacggtcatcgcctttaagtaagcaaattgaacgattaagaatacgacgcaggtttgcattaaattcagagcagaagatttgggcagcgctacggtcatgtctttcttcagttttaaacgcccctgccgcaaagctataacgctgaccgtaaattttagcattgccgatagcaaactttttgagctgtttctctgctgacattgcgcctaaccagcgagaacgacgaatgttttctacaacaaaaccagcataattggcttcatgcgctgccatgctatttagaacacgacgagctacgttaccagcaattgctacgttataagcagctggatttaaatcatgtaaagctgccaaaacctttacgtgcttctcacgctttgacaacccctttccattatgcttatcaaattcaccagctacaaacatctttaattcattcttattcattatcttttcctctattttggactgggctcaaagagtatctcaaaatctccctgaacccattatacaacaattattcctcaagcattataactttgcttgggcgcttatagaaagcatgagttttatcatctttcgctaattcaaatgtagcagtaaactgtactttgcctctgtattcaaacggaatactttttggaagggagccgtaaaccgtagctccattctcaagaacaaccatcatcttacattgtacgccgtaatagtcttcataaacttttactgacgttacggtaccggagacagtcactcgtccttctggtgcatcccctttattcttattcagctcattgaatatattatcaaagacctgttttgaatgttcctggatagcctctaagatgctcttatgagctctaacttctgccataacaacatctgtgccatcttgcaatttccactctttatatggaatgcgtacttcaagaggataaccatactcgcgaagttctttgtactccgcttgagttaagcggagtttccaccaaccgtggtcacctgtatactcaggcttatccagtgaatcaaattctgtaacatacggcaagtaactgcccgcgtgataagcttcaacttcacctaattcattttcccaaagataaccatcaaagggagcatgaggacgatcatctttgccccaagtaggagctacaactttatcaaagtattcacgaccgaagcgggtcttcgcccatccagcattcaactcctcggcgcgtttttcaactttcgctcggtgtgcttggcgggctacacgattttcttcaacaagcgcagagataatctcggttaaagttttcattttattctccagtttggttgacgagaccatcttatcaacagcctcgccgaaagtaaactactttgtgaaaaattttctccaaagcagaactgcgtctctacgagatacttctactgctcctagagcaactgcttgcttgcgacgaacatcgcgcaaatcatagtgtggaactcgcttatcctggaaccaagaacgtttcattccgatagcttctgccatagcatgcaactcatcaaggttgtcgctaaacatatgacaattctttacttgatgacctctcattttccagccatgattcatcaagacatctacgtatactgtcatttctgattctcgatgtaagtttcaatgatgaactgtgctaaacacagaagattatcttctgaaggagaatctactaaattctcaaccatttcagaaatagttccaaaagcttcttcagtattgaacatttcttgaagttcgttccaagtaggtgctttcatttcaatctcctcattagttaacgaagctatcttatcatggcttttctaagatgtaaacaacaaaagggcccgaaggcccttaaaaagatcggaaatcactgttaaaccatggcgactggtgttgtcgccgcttaagcaatttcagttggtatttcctattgtcttctataatcatcttagaggcttttagctcttcagccaatgagacctgtttacggtccatcaagatgaggttctgggtcttctgggcaaacgtctgaatacctttgagacattccacagattcctccatccctcgtttatacttggttcgggcagcatttaactgcccttcgtaatacgcatgtatagacactatagtactaaacacgttttacctcaataacatctaagataatatcttcaacgtcttgctcagggaatgccacgccattggtctgcccatgctgaaatactgcttggtacgctgacggcgcagaaattcgggttgaacgttctttattgtcatagcatttgccatcaataaagcgtttaaatttaacttcataggtttttaacattattacaccttagcataattgacaatttgttcacggtcagcaggccaattcaaatcagagcgctttttgtttgaccacgcaatattttcttcagcccaatgaagtttagccgatacgctcttttgtacttctctgatggcttcttcaagataaatgcctaaatctctcgggttagttccttgagttttaaatgcattgaacaaaatatttcttacgacttctttaaattgattttcaacttccggatgaatgaattcacgataaccgttgcacggatatccaaaagcatctaccatacgagcagtactaaattctttgttcataatccgagagcctcgcgttcatcaggatttaatttagccaaagcggcttctttaattttttccaaccgtttacgcttagcttcaggtgtttcttcctggacggtgatagcagcctttttagggaatgtccatgattcaccattttcatcggtgaatgtaattagttctgttggcttacgattaactgtaccatctgagccccaccaagactgccccttaactgcttcttcggcaacgcaatatgaaccataataaccaaacaactcactacggcgatcgtctggtgaaacatacgctgcataggcttcactttctgtcattacccatttcattttaacacctcatagcgaataagttcaatacgatttttaagctcttggtatgatttacgccaaggcttataataagcatttaaatcttggtgttgtttatgcatttcgtctaaatgctttactgcatcctgtacatttgcaaggaaagtatcaaatactttattagcgtattctttcctgagctcaatgaacggaggagcacgaaatacgtttaccattacacgtagttcatgataagaagaatggacttcagctaatacatttttcttatcgccaaaattaaacttataaagtttttcacagattgcttcacaggatttctctgctttacccttgggtttacccgcaaagatatgaccaggcggatatactttaatatcgtttaaccaacattcaatatctttaatagctgctaaactcattgtacccacgctccattttcatcaatgtaattaatccactcgttaatagtccaggaagaggtatcacctttaggagtatcaacgatatacattccgcctttaaacaaaacacgttttacatcattagaaattaaagtagccattatattttcctcagttagggaggatttctcctcccgtttaaattatttcagcattgttacttcagcaatttcacgccagtttttacggtcagtcgcgacgaaatcaccaatataaagagcagtacggagagatacgttacgcagacgatttacgttatctttcataaattccaaaacttcaataacttcggaatttcttaacccacggttctgtaacatagaagtagtcattattacatcttgaactcggaccataatctcttcattagtgtgaacaccaaggtcaagataaaccgaacgtgataccagagcttgaagatgtggagcaagtttagaaccgcgctctaattcacggtcaatatcaacgttagtgataaagaccacagtaccttcaaactcaaactcattaggaattcctttatcttccaagaaagaagatgcagtgctccagcatactttacgtttctctcctgaatctaatgcagctttcagaaggttcaaaatgtccatatcagagaatacatccacatcgtcaataagcagaactgaatttgcttcacgtgattcccaaagacggcagtacaaaccaattcctgagattttaccgttcactgatttgtaatcaatagcgttagtatcatgggcatgttgtaatgctttatccaaagagtaagtcttaccgatacctgctgctccggagataatcagagaacgaatgttcccgtggattaaaccgttagtcattaatcccatgacgttaaagcgtttcttgatacgctctttcatttcatcaacggattcaacaacttcaattttagcagctacaccgtcaactgtaatatcatctttgaatacccaaacaccacgctttttaccattcagttcaacaaagactttaccatcaccctggcgagaatcttcagcacttaagctatccgggaaccactcaccgagtaactcataagtacctgaaatctctttgccgaagtaaatccctttcttgatggtgatagttgacattttattctccgttactctgttttgttttgatggagctatagtatcattctacagctccaaagtaaactactttttaattatttttctaaaatttcattgatgtagtaaggacgaacctttgaaccgagatagaagtcatcaacaaaatcaatcaagttgtcagtttcaccgcggatgatagcaagtttagagaacgcttctcctaccatcattggttcaaattctacgccgtgagcttcagcagctttaaaggctttatcaatgttgtttacaacgatttctaaagttttcattttattctccaatattttatctgtttgggtggtacaggtctatagtatcaccagctcgcgagcttgtatactactttatgcattcttttgaaacaaaaagaggagcccgaaggctcctcagttatgcatgcttattgatagcattttctgctatacgttttggaagtttacctgcccagcggaagaacatgataatcgctccggcaataaacgcagggaaccaaaagatgagataaaaccaatactctcctgctttctcgatggttccatttttgattagatgcttacagacagaccaacccacgacaaagtaaattattgcaacaacgattggcactactacgctccacagtaaaatcatatttcagcccagtaaagtgagaaccgaagagtttctccggcccatgacataaatcggtggatttgttttcgagttggtcgagcagagaatttagcattttctctacgaccagtctctctgcaaactgcttccaagtaccaccgtctacctttatgaggtcttccataattcaagaagaccttcattgtatcatttgtagtaagaattgtggttttcaagataaaccttctcgacgaaatcgtcccagaatttcatgtctactttcttaggcattccattcttttcggcttgatgagcaagacgctctactgcgtcaacggtcgtttccaaaatatcctgaacttctttgaacggtaactcaccagctttgattttcttaatcaagggagcctgtgtcagaggatatttaaggtcaccggaggaataaatctcctgcagctgaagaccaccacgaagggcatgacttagtgctttccaatctacaccttcgttagcttctgccttacgagcgcgttcgccatattcagcatcaagcttctcaagggagtacttcatttccttaaccgtgatagttgtctggaatttacgacctaacacattatagaaatactgctgacctgatttatggtctgtaaaggttgtccactcaaggaattcacctaccggaagacgatcggcgatgtccttaactttccaacgatcgttaatgcctttctgcttaggacgatcgtcatatttccattcaggaacatctcggataacatccaggactttatgcaaatcggctaagcgagaacccttaacaccatacttacctgcctgtttacgaacatatccgagataagctttcatatcagtagtatagaaacgggctcggttgtcttgaatgaatttccatacttcaggaaggtcagatgcaactaccaattccggcggagtatgcagcatgtcaagtgcaactgtttcaccgtcagcagcgagtttgaagaagtatttcaaactgaacagctcatggtcaatgtcatctttagtatttttggttgcactgttattcgtattacgattagtatgattcatcgcctgacacattagaatatcacgcggatgaggaacaaagatttctttgaaatccacatctgattcaggagttgaagtaccgtatagatgcgaaccaaaataagattttacgattgttttcataagtagatatgattccctttagcgaatttaactaatgcattagaacgtttgactgcttcttctgctcgagttttatctgtagttctttttgatgtacgataaacattaccaattttttgactggtgtaataatacactacttcatgagtatgatactcttgtccatcaggatgctgctcacgacaggtttcttcgcgcagtgtggtttcatacataggaactaatgcccaatcaattcctgtgctaatgattgccacctgaatgtcaagtctgttccagcgaaatgcattgatatatcctagtacccgtgattccgggtccatcattgcgaatttaatgttttcggctgaagctaatggcatttgtttcacaatgctcatactaagttttttcttagtagttacgagttcaatttccatgacccgccctcataatatatgtctaaatcaatgttatctttgccgctgtacttgccagtcaaaggaataaatttaaccgtaatcttttcgccgtcatcaaaagtaaattcggcaataggatatgtagaaattataccacgttcggttttagcacgaaagacggcccgaaggccgttaacgatataaacttgatcattcttcactagttttaccttctacataatcaatcattgggcagactttctgcttacgagcttttaaatactggatgaacaccaaaggttcggcttctgccggaagaccagcttttacccgagcgagtttcttggtatactttttctggatacggtaatgtttaaatttttctaaaccaaaaataaatccaaaagctatagctgcaaacacaagcataaatgctgctataaccgctgcgccaactggtactgctataacatttaaccaaaacgtggataaactaatacccatccaggcgagaattcctgtctctgccacaatcggccaaccgaacatccatgcaacggaaccgatgaacgtgataatcgccgaagaaaacacaacatgaagaactgttgtccaaaagtatccgcacagtgtttttggcattttccacatgttgtcagatttaaaccacaggttcattttgaaatgccaagagtttttattaatattcattatcagtccttcatagtcggaatcatagttacaagatattttacgagctgttcagcatcggatttatcaatcatcaagatagtaccgttgcgctcaatttcaataagtgtagaaccgtatagctctacggtagtcagatgcaaatcattaatgtatggactttcgtcctcaattactgcatcgcctttacgggattttccgtcccatactaatttactcgccatcttttgcctctatcaagaattgaattaatgaatcaatttgtttagtatcaagatgaattatatcattgccttgttttagcacgatacgactcaactttttagtgaaatacgaattcacaacctttacatgcacatcgctgtacggattatctaaattggtactatcaagaatactttccataattacctcaattgtgaatcttttgaaccacgacgattataggcagaagtcattacactgtcccactttccttgacattctacacaccgttggcagcctttaacaagaaggcgacgagctattggaatttcctcatcacagtcaacgcaaaactcttcggattcgcgttgttcttgaagctgtttctggagacgggcccattcaatcccgtctgctatagtggcttcacgagttgcgaagccgtcatccgatggaccccatccgttcatttcaaactcgctataattaaatcaagcaaatcgttaacaaagttgtaagtaaacatcggatattgatattgaactaccatgtataaaataatcaagatgtttttcattcttcgccatcatcaaagtcgtagtagtcgtaatcacaggaatcaagataagaatccatgaattctttctgccgacgaaaatcctcaataggagtcagtctgtctgcatacgcttggtcatctgggtcactgaacttgtcttcttgcagttctttaatgaactgttcagcttcttcacgcgtccaaaacccacgattaagattatgaaccgaacgtttttcacctggcttgaatacgcccatatcatgagcagaacgctcagttgaataactttcagtttggccagcatagttttcatattcgcaaatcacctggaagaaaggagattttcgcgaatatacaccacgaagaccaagttcaacatcatacgtgcctgatgcaacaatgtaacgcgaaatagaaccagacttggtttcagtgcgattaacaccacacacgtgataaaagatttttccaggttgaagctcggtagttaacttaatcataatgtttttctcgtttggttgttgatatgtctatagtatcatgtaatgaagggaagtaaacaactttttgaaaagaaaatgcctcccgaaggaggcggagggtattactgcaatgataacaaatacttagtcttgtagcatagacctgtaatgtcatccagaacactttggagggcggcaggaactgacttgtagataccatcggccttagccagaatgaggtctagcatttcaatggtgtcctttggcagctctttctgtgatggtaaagccggtgtataactcttacctgagaatcctaaccactgctcaccaaaagcatctatcaaatctggaatctcgttaaagaaaacttcatacgctttatgtctggcatacgatttggtatcaaaatgcgctgaatgaaaatacgcctgagacgccataagtaaaccgatgaattcatcttgtggagtaagtttaccgtcctttacaaaatcattgaacttcattatcgagttgtatcctcatgcggttagcatattcttcacctgctgaacgtcctaaagaatcacaatctttagaacaagactcgctcttccatttactttgtatgaaagaatagaactgttcagactcttgcttactaggctccttaaatttagcataaacttgtagagctccctcaacatacgagttataatccgaaatgtcgtcgtgtgatgcagctgggaatgaaatcccgcagcccaacaccagggctaagcaaattggtttaaaggccatacggcctcctattatttttgtccagtattacgtttgtgctgaagtacagccttaacttctttgaggtatttttccagcttacgtttacgggtataatctgcttttgaactgtgctgacgaatttcttcctgaaggtgcgaaataccatgcccaatctcacgacgaagttcgtccagttgttctacagtaagattacgaagttgcttttcacttaaatgctgcatatacacctcatcagttagtaatagtatttatataagtatgtgttacttaatcccaaagccattcgcagatgccttgctcaatagttctagcaccagcttcgtcccagttatattcttcgtcatacttcaatgcgcgtttaatttcggctttatgaaatagacgtgggatcggcatagcataacgggtccaacgtagagttttccagaatccatcacgctttgatttagcaatcagtttcttggcctctagcggtctttcccgattttcagaaatacgcagttcaacatatttctgttgggtttctttatctttctgagttttaacgtattcgttatagcttttaatataagcaaattcgttattattctgatcgttccatttggaagattttactacatgccagcctttacggcgaattgttctagacattattacctcgttaagttaaagtacctcaacgatagtaaaatcctgatttaaaaaatttaatattcatgaatagattaccttacatttacatttggggcattcaggttctttattcttaagacgcttggtagctgtctttggagcagtgttgtaatcatatacatgaagacaacggtagcacatcacatattttttcatattaaaccatcaacgaaagcaatattacgtacagcaagaatccaattatgagtactatagtactataccacttgctatggcaaataagctactcatgtttaatataacacccattcatattagcaataaagtctttaccttgtgctaatactttacagctagaatcaagacgattttgtgcttcttctcgtctgtcgctttgcacagacgctgctgcagcaatccaaatgaatagcatacctacgattagcatcaggatagtgttatacgttcttggcttcattataaacacctaccagttcgcaccagtgtttacgacaaagagaaacgtatttgtcttcaccaccaagttctactacttcaccatcggtaatagcatttccgttttcgtcaatacgagctaccattgtagccttacgtccacagtggcaaacgcccttgagctcaacaagtttatcggctacagaaagaagagctttagaaccttcgaataactcgccgcgaaaatcagtgcgaagcccatatgccattactggaacatcatacaagtcaacgattttacatagctgaagaacatgttcagcagtcaagaattgtgcttcatctacaaatacacaatgaatatcacgttgtgtttgtgcccacttgaaaaattcaaggatgtcaatagattcgtctactgtattagcttcatgacgtagaccaatacgagatgttacctcggtggcagaatctcgagtatcaatagcaggtttaagaatgagagttcccattcctcgttctttatagttatgagctgccgtgaggaggttagccgatttgcctgcgttcatactcgcatagttgaaataaagctgagccattaaagggtctccataaaatcagaaatagctttcttagaacgaatgagttcatcgtattcttcaggtagaccatttccgtaaatggcactaatagctactacttgctcagcacctgcataatcgtcaatcaactgccacagtttagttttttgctctttagtaatcatctatttacctctaacaaaacagatttagcttttagcttcttcatattctaccaccataatgtcaatatcaggtgttgctaaattgattaatttctcaattagttcccaatcaccgccagcaataccagctccaatttttggaatgtacagaggacgattataaacaatacggccagaatttagttcatggaatgcattaaaaattgcgccgtaatcaacatttggacctggagcatactgggtgtatagattatagcaatatgcagtgccttttttgtgaatggctcgagtatgagttccaagcttagctaaattgttgtcataataacggtcttcatcgatgtcaatatcgagaattggaggatatgctttagcaagttgtcctgctacaccagcacccattgtagtaaagcaattacacccatgagcgatatcgcattcatgcttcatgaatagttctacaatattgcccttaatatatccagtaatcatttattcacctatggaattttatatgttgcatattcattaagattattgtatactcttaaaaatatagcattgttacaattaaggatagggttcagcactccttgttctttaggatgcattactccatcaacagaaacaccgtcactctgcattccacatccgcgagcattatactcaacatgtggaactatcacttggtcatctttatcttgataattataaaatgacattagcagttttctactactaggcacaaatgctatttcaatattgttcttgaatggaccgttgctttctattttagtcccctgcgccgctagtacaggttcaggatagcctgggagcttttcccaggcattaactgaaaatgcacagcataataaaatagctgcttttttcattttgacgatagtcctgacatataacgagccattaattggtcacgatacattaaacatatattttcgttaggagcattgacacataaatctttcatgctcttagccttacgatttattagtgttgtccactgagccgggctacgtgaatcttttactccatcgctgaatgccgaatctaattcaagcgctaatatatcaacacattcagaattcgtattacaaaatgttttagcaatacgaagtgaatccgacattgaattttcagcattaacagagaatgccaatactaatccaagaagcgcggcgtactttatcattattccacctttatatgtagcattttatgtttctttaagaaatgagctttctctaggacatctgacgcataagagtttcctcttttgacattccatcctgcgttataactagcaagagcttttcgcatgttgccgttatgtatatttaaccaatatgaaagctcaatatatgccaactccgcagaattacgtctggatttaagcatttttcttatttcagaatcactaaggtttttaccttccagtttagctctggccttaacggtgggtaagtaattttgaaaaaccccataagaatgatgccccgttcctgcttttaaattggctcctgccgaagattctttccatgatatagcagccattatatatcctaagccgttattatcatatcggttatgtggagatttttcctttccggatttttgatattgttcaccaaaattatatgcgtaatgcaagttgtcaagttgaacattactgaaagttggctcagacccaaaggccgttgaacataaggccattagaccgataagcgcttttttcatgtttacctcaattaatgtgtataacttttgtgctgattttacctttcaaacgtttatcattaacgaatgccatacgacactttatactaggtccttttcctggtcttggaatatccatggtaaatcctagccacagatttccatccgtaatttctaaccgcatgggtttatactcgatattttcatcaatgtcttttgggtcaattggaagccaaggcattgctaaaaattcattaatttctttaagatgattaggaattttggaaagaacagagaatacatactcttcatcaatttcacgttggatagcacggtccaacaaatgatcagagtacttagtgaagaaaggctctttaccctcagccttagctcgggcacgaactgataaattcaaagagcgaaaagcttcctcaaacttacgacgcagtttagttctgcgaatgaatacttctgggttagttgacatagttcattctcctttatttgtagggccatagtatcatggcccgtaaggaaagtaaactactttttaatatttttcttctggacagaacactgcacggcaagcccacatagaagcttccttcagtttctgttttgctgtacgaatctgggcaatacgttcgtatgcttcatcgagtacctgcttgggttcattgactgacacttggtaattaattaatgcctcttcttcaagagcagtaaagataagaccaagacgagtctcagcgtctttgatagcattgactttaccaatcttttcatcggtatgtggcttgtatcctttaatatcttcgattgacattatagtgcctctgtgaaagtacgagcgataacgtcgcgctgctgttccggcgtcagggagttgaagcgcaccgcgtagccagaaacacgaatagtcagctgcggatatttttccggatgctcaaccgcgtccagcagggtttctcgacgcagcacgttaacgttcaggtgctgaccgccttcaatttttaccgttggctggtattcaatttctacttcacgagccttgtaaccataaaaagtttcagcgtctgtaatagtatcttctttaagaacttttgaaacgattactcgtgcgtcatcgccatcttcgatgtaaatggtgcctttaagttcaccttcaagaatttgatatgctttcatatttcctcttaattagattctttattccaaccatgcatgtatgcggtaattacactcattttattccattcgtctgaatgaaacttcgcagctgcttctagataagttattttatcttcatgataagtaacttcttcgtcagtttctttatcgtactctacaatttcaataggctcgtcaactccatatccgcgagtgcctatatacgttgtagcttcttcccattgttttgtggtttcattccaagttccattctgatgggcttcatagaaatcttgctcgccagaattactgaaccaatcgcagaagctttcaactaaatgtggaggacactttataacaatttcagccattgcgttgttttctcttgaatgcgttggtcatatgtgattaagcttgaactaatcacgcctttgagcttgccagatataaactcaattctaaaattaggatagcgattcatccacttcgtgttaggagcgttagaaatgaattctgcacctttaaacggaccagacagaaacttgtagcgcttgtactcaagcaggttgccagccgtaaccattgttattaattgcttcatatcggcaaatcctgtattttccattactgtaatcatatcaacaatttctgtctgtgtcatcattgcattcctatcacgaaaaataaaggcaaggtatcattaggcatagaccatctgatagcttcctggtacatatcatagaacttcatcatatcgggaactttcattggttcttcaatgataattaatgctcttccaaactttcttcccctaaacttgtaagaggaatcattggatagaaattccctgattgtcatcggaacaattgatttagctatctcgttagccggtaatttattaattaaatgcgatgaattatattctcgtagaataccttccatcaattcagatgattgtgtgtatcgagtagataagattataaccgaaccatcttcaagcaaccaatcggtagcgaattgacataaggctgtggtctttccggtttgtcttccaccgtctagacgaagggtaccgtactctcgcataaggcaagacggttcataaaaactgtagttgggattattcaatcgtctgtctgcagcgtctctgaaagcatgcatcagggtcaaataaatgggagttaagtgtttcattttagattccagttaaaggggccattccttggcacatgtttaatccatcgacacactatgtaaaccccttaccgcacttgcgctcgaccttattacaggtagggaaagctacttcactcagaggactcgacgttcatgaggagaggtcgtgtttagctttattaggaattagttttaattacgggctgcattagcaacggcgtaagcgtattgaacattagcgtctttaaacgtacctttagtggtatctaaatctgccttaaatccgcctttagccataacctcggcgaattctttacggaaggccatggcgtcaagatttttccaggctgccttatgcttggcgaattcgaggcctgcaaagttgacagccttagccaatttattatcaataacccatttacctgctttaggtacaaataccgggcctttctgtttagagaatagttttaaattccagcgccgaaggtctccatcagctttaacaaaagctgcgtctaagttactagcaacaacatcttgaatatgaccaaatttaagcccatcggcttcaatatttagatcgttacgccagcgaagtccttcccaggcgaaggctttaaagtcggaagcctttgtagctaaataccgctcaataggagctgttttagggtcaaagccgtttcctcggtaggtccactcatctttattaatgccttggacctttcctacagaagcttcagtgataaattctttataggttttcattttatatcctttaagttaatgtgtggtatagtagcctccatttaataaggctactataccacattaccgtctcaatgtaaactacttaattgatttagcgtaacgaatagcgccgcgatcgtttacgaatgcaattttaccattacgcatgtacatggtaacagtacgctgataaccgttagaagttttgccagactgataacctactaatgcaaagttgtcttcaccaggtttgttctgcttagacttaatacgctcatgaccaagtgccattaaggagcgtgcatcgccagatgctactgctttacgagaagactcatcttcaattgaagaggtgaaatcatcgaatgaatcaaacttggcatggctcttattatataacttgccgtctactacgtagttatatccaacaacatccatttcaatttctgtaccatcttctaacgtggcggtcatcttctgaccttttttaaatttcagaagattacttccaacagattcagtcattacgccaactgttgctaaacgggattcatttaaaaattcttgataggttttcatttattttccttgataagcagaccaagttccggtccgcattgtttcaattacacgacgagcacgatttggtgtctgacgataccaacgtgaatttgcaagttccttggcagcagcttcccactttttagcgagtaataacttcattgaagctgggaacccggctacaccagacacacccatttggaataccatgttaatcagagcagctctacgaacatcatctaatacattatataccgggtttaatgtagcattagcaacaatacctttaattgccttctcaacatctttggcaaaaattacttctgcctcagcctgagtaatttgtccacctgtagaacgacctactagcttgtccaggttagaaatagctaaagattttgacgggtctttagtcagtaagtggccaataccaatggtccaatacccttcggtatctttataaattttgctgtcatatccttcatcgatacgcaacatgccaaaaatatccataaggacctcctattaaattataggagtatttatttggccctacacttggctataaacatctcaatgctgcaatcttcatacggcgtccatttacctttccaccatacataatctcttttatcgtcctctggaatttcattaaatcctggacataacttttctgccatgtaatacgacgattttgtatactcactatcactgaagacataccgtgatttcattagtatacgcgacattttatctctaggatgaaatatgctaatccattttccatcgtgaataaatcgtagctcatgcttataaatgtgtggaatgcctaattcaacggcttcttccatagtaacctcactgggctgtgctatacatctgtgtcatgattttatacaaacttggtcccatcacatatttccattgagaaggtttaattaaagcaaatgcgtcgatttccgggaaagaaattccattttcatctttatggtaagctgtgcaacagcaattcttaaacacttctgggctcacagggagcatatatccaaacagatggatatccttattgctggcataatcatgtcgtccaaggtcatataagaggtcctggtcaaactcagtaaatccagtctcttccttgcattcacgaatagcagcttctttcggtgtttcaccaggctcaacatgacctttcggaatatcccatctagagcctctgccctggacatatgtatttgtcatacgacccatgaaaagccgtttgtcatcggtaaagaataagattcctgcactgagctctttcattggcattcattccaactttcttcaagaatatcttccatggcagtatagaccatagactctagtacaccatcacaattatatgaaccctctaccgagaaatcacagataggtccattaatactaagcagttcttctttaagtgaaatctcgataccgctcagtgattcattatcactgtaacacagaaggcgagtatcaccattttcaaattttacatgcactgcaacagccattatttcatctccttaatccaggataaagtttcattacgagaatcatctttagatttttctttctttactttgggcttatcaaatacaccccgctgccgttgagaaacgaattgcaaccaacgagcaagcattgcaaaccaagttccaacacctgacatccaacctaaatagaacaaagtatctccaaagattggtgaaaagaagtaaaaaccccaaaaagtcccaaatccaacaaaagctgaaaatgaaaaccagataagcagaaataggaaaaaatacccaggctcatcgtctttaatcattccacgataacaagttttaatcattttctgcagctcctaatccaggcattaaactcttccttttctttccacttcttgtatttcattcggtaagctaaaaatgtgcagcaattaatcaacgcgataatcagcttccacatgaggctgaatgcgaaaacacctaaaaataaaagcaacttctgaaattctgagacgttcaacccaaataatgtccctccaataattacgaaagcacaatataaaatccatgtcacgattccaaaagctggcgccagtccatcttggttccaaaacccgtcaggtttacattcattcattttcttctcacctctttaataaactcaaacgactttttgcggttccattcaagagttaaattcttgcactgttctttccattcagcctttcgttcacagttatgcttaacatactttacccaacgaaatagttcaattaatcctagaccaagtaaacctattaatccccatgtaagtaatattacattcactaatgatgtactgctaatttcagccaaattcattacgtcgattatgataagcgttatcatagttccagcagcacagaccatccccggaattagaacataatcagtttggtcaaatttatatacataattataaacgggaagttcacttggcagatataaattactcatttctgcaccctcttacggcaatatttgataaattcatcaatgattaattgtttgcctaccatgttgttagagtcaaacatactcataacctttggtggcaattcattaatgcagtaatttaagtaattgatgtaatcatctttagatgtcacatatttaactaggttaatgccaagacgatagctatttttattatgaataatctcaataactatggtgtacgttgttgaaccagaggtagaatatccatcggcattagcacgggctgatgttagatttgatggagaatcgttaaaagaataaattccgtaccgaagtgcaaagatatctacaagcttaactccatcggaaatagacgaaatgctagaaattaagtttttcagcttagaatagtctttaagaacgatagctcgcggcaaaactgtagtgttatacccgttatagcgagttttccaattctcaggccgagtatcaagacaagcaaatttctcaagaatatcagtgatttctgttgggaatcctgctgcaattaattctttaatttgaggtgttgccattggaatatctccagcgcattcatataacattttattatccaagttagggggcccgaaggccccggtaaaattacttcagactttccagatattcctggacatcagcagtggtggtttcaataccaggctgagtaccgctgaaggtttcaactttcatcatgatgtcttgtacatctactttagcgagttccgcgatttcaatcacgtcatcagcagaggtaatacccagagcagaagcattacgggtctcacggatgtattcgagtttcactgccaaatcaagacgttggtcatcaagcttaactacagtttcttcaatttgggcccgcatttctttatattcggcagctttatcgcgtaaagctttagcagtacgacgatacagaagacccagtttagcatgggtttctacattcataccttctgccatcaagcgacgaatttcgcgctctttggaagcacctgcctggtctttttcgtcagcaagtttcagcagacgcttttcttcatttactgatttaacatgcgtggtacgcagtttagtgatttcatcaataatacgatttgctgcagtggtgtactggtcttcaacagaagtgttctgtgcaacaaaggtaccgaatttagaacggatgaattcaacaagttttttcagaatagacattttatttcctttcaatagttatggtggttttattcgtacggattaatccaatcataaacatatggtttaatgattagaccctgttcatttttgctgcgctcgaatatctcgatgtaatcagtaacgtatgattctaatccgagaataagtacagactcttttccttcttctactgttgctttaattaaacgctcgatggctattttagcttcaagacgaatatcagcaagagtttttggaacttcatttgtatgcattaatgagttcctccattttgtccaaaactgcgatatcaacaagacgattaaccgccgggtcatcggcaaactcattgtaagttgaaatcaccaggttctcaatagttttcagagcagccattcgttcttcaccggatggaaaatttggagtttcaccaaacagcctagcaaaagatttaaaataagtttgcgctactaatttcaacttatcttgatacataccaatttcctcagtaggtggggagttcattataactccccaaaattattagcagttaattaccgcttcaattcgtttaaccaaagcaggaacggttttagcaaacttgatagccatttgaaccgtagcagcttcttcatggtaaactcgaacgtagtactcttcaacagcaggccaatctttgcgaacatgtttaatcaaatctttcagttcacgagtttctgctacgttgaacactgcgtgttcatgttcacctttaatccaaaccgcgcgataacgatcaggagtaccatattgattataaccacgttcaatctggataaagttgaatttagacattttattctccgttactctgttttgtttcgatgtagctatagtaaccgagttgactggcgttgtaaacaactttgtgcacaaattttcaaataattttagggaatctggaaggactttctagagagtagaatggatttatacagcttgggatatagaaatgcccagacgacctctagaaggtatctgggctgtagttttgatattattgtatactaaaaagccccgtccgaagacagggctctgagaatcgacagcatcacctactggcagatgacctgctaaattcattcctttgaactcggaggcatcagtctcatccaaaggagtatagcgtcaggaggttatgcttgcgacagggaacaaccgactagcggcaatggacgaaccattctcttctatctgacgactcaacgagggcatacgcaagtttcccttcgaatttggtgccgattgcaggagtcgaacccgcgacatcttcattacaagtgaagcgctctaccagctgagctaaatcggcataagacggaaataaggattcgaaccttatgtagttgcacagacgtatctgccgttgaattcctcactaagtttaagcaactattcccggggtcttaatttggtgcaccgagagggattcgaaccctcaatccttgcggcgtagcattttaagtgctatgtgtataccagttccaccatcgatgcgaaatggtcgaggcagaaggattcgaaccttcgacctgcggattagaagtccgctgctctatccaactgagctatgccccgagattgttcaggcaggactcgaacctgcacgactgattccgtcagcgatttaccaccgtcgccagcatatgatgcaatatgcgagctcaaaaggtgtctgtcaccatgtctaccgatttcaacactgaacaagataattatattactgattatttatagcatttctcaaacgataaagttgattgcagaattcgcgttcagtcaaaatcgtttcagaaattttatttttacccatactgtgagtgagcgtagcattcctggtagcagccaaagcttttctgaatccttcatttttactaagtgcatcgtatgctcctgttagtaaattctgatacgcttctgaggcacggtgaataggaacacctttccaataaagcgtttgtgttggccaccaacgtttcttcttacctttgaacttagcggactttccgactagtgtacatacatgtgcttgcatttcaggtgaagaaaatttgagggactgcaagaatccctccattgaggcacattctacgccatcatagataaatttatgaggagcaaagttgctcaaagcacatgatggatatgaactacctgaaccaatatccatttacttttccttcacgtatttcaaccaatcaacttttaacgggctttctttttgtttatacgtaattccaacatggaacgcaaccggggcgtcaggaatacggatttcttctttaatatcgaagatttctactttctcaaatacccgcatgaaatcatagtcatattcaattggattacccaaccaagcctgaatagcatacataacttcatttgaacaagaatagtggttatctaaataagcatcaaactcttcgtctgaacaatcatatgcaggaacatcaacgccaaagaatttcttggaaaattcaggagttacatacttctgttcagtatgaagcttttcaagaattgcctcatggttgtaatcattatttccaaggcattcaccacgccggccacgagaagaaaaccattcaagaacatgaattacttgattaatctcttctttttctaagccataaaccatttgggtagaataccgatcagcatcattttcccaagtggtaattgccattgctaagcctttaggaataacttgtccaaatttaactttcattatacattcctcatatctattcgttctaaggtatattctttaagaacaatctgttgaccacttttcaacaagaataattgaataggatttaatccaaacccgtgttctaaatcgtggtcagttaaatttctgtcgcaataattgaaatacatgtcaattctaacgagaatggttttcataactcctcacacgaatttggtgaccctggcaaagactcgaacatgcaaccaatcccttatgaggggaacgctctaccaattgagctacagggcctttatagaaatcttatgacttttataaaagccctccgaagagggcgccttgtcgggcttatccacctgctaggcagaattactcacacataaaatcagctacttcccagaagtcatttttaactgctactttaaccaccggagaaatttcagatgttttaatagaaacaattacatcacctgcgacagtttctaccagaccaacgattttctcgctgcgagcaacaaatttactcaccggatgaaatttaccggtagcagcgaacatagcttcttggtcaacaatcagtgcgatacgtttcattctttttccttgtttgttttgatgtagtaataataacaggttattcttgtagcattaaatctcgaaaatcgttccgttttcccacattgttgcgaacataggagaaaccttaacgaatgatttgcttcgcattgcaacgtagtcgttatctactttagccaatcctgaaacaatatcagtaatacggccacacttcatagaaccgcgaccacctttattgtatgtgcgttctccgtagaaaacgatatcaccaacttgtacttctcgacctttagaatctttcatcatatttcgcctggcaaatttgtttaaaatctaatacaagttgctctacattagtatcagcggttaacggagtaacttgccgcagtttattaattttacacccagagtgataagcaataatttcttgaatatcacgttcactaaagtactcatatttgagtaatgtgtcgtatcgatatttaatccaaacccacatacctttgcgttcatcaaatgtatatgcaaagtcagcgttaatcattaaatcccgtttagcacaagatgaaagccctaatgctaaattaaccggtccatccaaagacagcttcaccgtaatagcatttacgtcatttgatacaccaataaaaatattcattctatttccttcgcttgtttttggccttcttgtcgtgcacgagaacgtcctgctttatgcagtgattcgtaatatgctcgacgtctatcaatgttttctgtacgatatgctttcccgaaatgggatgttttgaagccgtaatatttcataatataattctcaatggcgagtgattggacggtatgcccggcctcgaaccgagtcacattgactttgcagaatccatgtgtttaatatatcacccatactcgatagcatatctgaacgagactgcaatcccgctactcagcttacgccatcttgtattgtgtcataccgataatttggtctccatagaatgactcgaacattcgacctctccatcccaaatggagcgctctaccagactgagctatacggagtaatttggagcatccaaagggaatcgaacccttatcaagtgagtggaagtcacctataatagccgttatacgatggatgcaaatttggcaggccctgaaggaatcgaaccctcatcactgggtttggagcccagcataatagccgttatactaagaacctgttatttggtgggagtaactggactcgaaccagtcaccgctcgattatcggtcgagagctctaccaaatgagctatactcccatggaaagctaatcatctaattgttgatgtaccactgctatgggcagcgtttaactttcataaatttggcggagagtaaaggagttgaaccctcaccgtttccgatggcccggatttcaagtccggtttgctaccactagcgctactctccattaattggtgaaggaagtgccatatagacacaattcgcttagcgacagccacagcattttgcgggccgtgtatttttccaccattccttcattgttggggtgaccgatgggagttgaacccatgactacgagaatcacaatctcgagttctaccaactgaactacggccacatcaatattcactccatccatcatgaggacttcatacgaaattaagagaagaatgatcagttcaacccctgtagacgcgttgaatgaatattaatttggctggactatctggattcgaaccagagataccggagtcaaaggccggtgacttaaccgcttgtctatagtccaattatttggaggcggaggcaggactcgaacctgcgcgtgtcgggatatgagcccaacattctaccaactgaagttaccccgcatttatccgggttcttgaagtactaacaagtagcttgatgtagaacacgctaaagatataatcttacgaatatagagcttattccgtgggaacaaacagcttcgtcctcggcattatcttacaggacttaaactcatcttcaagaactgccacgttactttataaacttatttatgaactttctagcttgagtatgactaattccaagtttatttgcaaattttactagtgcaccacgctgtgtaaaatctatagaattatacaggtctattcgcaaagaaatttcgtctgcatttaacttgtgtgcatggttttctgatatttttatttttgtttcatcagaatggttatgtccagtaaaaccagtagatattattcttccgttagcgccagcgtctttagcgttttgcgcattagttgcgcaatagatgttatctaaagaatatggtccaacatctcctttacgacacatgcaatagttatctgatgctctaccccgcaaatgatatttgccagtagctttccaccatgataaccattcatcaaatgtcaatttgaattcaatacctcttgatttggcatgcactttttgcatgcggtacttttcataatctttcatgttgctctcgtatttggcagtgctgacgggtgtcgaacccgcgatctctcccgtgacaggggagtgtcttaaccatctcgactacagcactataattcgctttcagagatactctggcacgatgccgaagcaaaggggaacaggactctcatcaccttggtaccagatgaatcttgtttagcactctgttctaagatgtatccctgaaagcgaactttcaacgccgtaagaaattataacatgaacaagcattaagcaggatgaaatcatactccttaatacaaacgccatgccagggatttctgtgccgacgatttatcagaacgtcttctgacttcttcatttggcgggccgtgcaggtatcgaacctgcctagtcatttctgacacggattaacagtccgtcgcttaccctctcagccaacgacccgaatttggtgggacaccgaagactcgaacttcggacacccggattaaaagtccggtgctctaaccaactgagctagtatccctaaatttggtggggagtaatggagtcgaaccactcgagccttttgagcaacagatttacagtctgtcccgctacccctacggtctaactccccaatgggtaattttatttatactgctctaaaattaatcagagcagttgatagattaataataacaaagaaaacctaaagcatattacacaatcggtgagctctttgatttaaccaggaatacccgatgtggtgaatccatatgagagagcaatacccggtgctcaggaattggacttgtatggaaaggaaccacacgataacctttaggagtaaatcctagcaaaataccaacgcttgctgcagaaagtgacccgccgcagtagtatgatactaaatcaccaggctggatttcattgtcaagagaatcggttttggtatgcttaggcgtaactaaatcattagtaattggaacgccttgtgcatcatagtattcatgggcaagaagcttataattctcttgatagaaagtattaaatgcagctctgatattcatcacaatttcctcacaattaatctttgtatgcttcagttgaacctttagcaacagtctcaaatcgggaattcagtatctcaaaatagtcttgatacgttccctggagggcttcatagcattcttctaccgtagtgtagacacctctgatttggtcagagccaggagcaggataataattagaccaagttaaaagtgcgtacattacttacgtttccagctgtagtgagccaaaataaaaagcactgcaatagcaagtagtgatgaatgcagtgctgccagtagtgcacctagtcctacacccaaagtaacataatcatacttagttacttcttcacggtttaaatcatagtttttgatgaaccactgcttaatctttttcatgtgctattttatccattatgaaagaaatgatacccattagaaatgcaacacttaacactgatactgtttcaggaagagacataaaggctgcaccgataatgccaaaacctaacgctcccatgcagatagttgatgcaacatttctaattaattcacaacgtttcattttattctcctcaagttgatagggttatagtatcactactacaacccgttgtaaacaactttattcagcgccagcggcttttaaaagctttttaagattagcagaacctcgggctgaaaaagttaccttaccatctttttcaccgatgctgccagtcaatttagaaagtttatcactaggaacttttttaaaatcggctaatgtcccgtcaacggtttttgtaacaatcggcagttcatcatcctgtcttttagcttctgtaataaattcttggtacgttttcatgttgcttccgtttggttagtttgttttgatggagctatagtatcaccactaggaccggttgtaaacaactttgtgaaataaatttctatttcaaatcttctgaccagttcagttttagtggctcttggtactctctatcaagcactacaggtacttgaacttcaccctcgaagtgagctggaccgacattgtagctgagagtaatgtgcggtgagtaatctgggaaatcatgagttgctcccagagctcttgcatattggtgacggaattttaagtattctgaatctagtttaagaaccagtgtacgtccgtcttgcgtgtcccatacttcaagtttacctgatgtagcaacttcaaaacttcctgaagcgcaaacgtatggaacatgaactcttgaatagcatatcgtcgtatgaatcttatgacgaggtacaggattaggaaccttcaactcacgctgaaggtcctcaatagcatcaagagttttctcagagaatttagcagctacatatagaccagtgctaaaatcactgaagttcattaggcatcagcttcttcagtagtttcttctgcgaactgtgcttcgatttttgcaaccaggtcgtcaagtttaacctgaccatcttcactgatttcaacgccggacacagcaatcagtttctgcagtacttcttcatactgtgcacgcagagcggacagaccttggatggtttcagacaggtcaaatacacgaactttcagagtatcgacttgggcttgcagttgttcagtagtcatttttgaattcctaatatagtgttgatttttgaataaagttcttctagagaaccgtcgttagttattacgatatcgccttcgcgaatcggaagtccacgctctgtgacgtgagtatcttttttagaaccttcttgctcaggacgaactacatgaataactgtagcacccatcgccctggctacatcaagttcatggtcttgacgggtatctgggacaatgaaataatcataatcaccaaaagtatcagccataaccaaagtaaatcgttttacccaatacatgcgatcgagcttatcacagacaatgtcagtcccaagggtctgcatgagacgacgaattgaccatggctcaacaggtttatttattacaacttgacggatgacttccatcgtatcgccgtcaagaattttacgcttgctatcataaaccaccccgggtaaaggcaaatcatgatggacatattcaatggcattcgccataatacgaatcacgtctttagtagacagatttaaatcctgctcacgatcgtaatcaataccttcaatcattgaccgagtaatgcgaggaaactgacgtgatgtatcgcgataccactcagtaagcattgcatcagccaacgcatctttaattggacctgctaactgatgctttgttgcgttatagttatccataatgtagtcagcagttgtatctttgccactacgttttttaccaatcaaaaataaaagcttcaaattattacctcatagaaggatgcattcccataactttctgttgatactgggattcgcgagtatcattgacagaaggtctaccagtaattattataccatctttttcaacttcaatgtatttgtactgcaaagttgctacacataccattgctgggtcggattcttcggttaaagaatactcaatttcagataaatcactcacccaacctccgatgtagcggacagttaatactatatcatgtttatcgttatcaagaacatgcattaaaactgcaccaggaaatccttcaccgccgttattccatccagacttgtctcggtcaatgtagttttgacagcttaacatccatttgtacatttgtacccatgaatcaagattttcatctactaaaaatctaacaggaacagcgtcaaactcaaaagtagacccaggcaatttagcacgatgcatgccttgaggcgaacctacagtatcagtagcaggaatatgaattccaggaactacagctgtttgaagattagctttaaacgcttgggtgaggcccccatcagggacctctaatataaagttagttgtgttagtttgattaaacagtccagtagacattatgatttccatacagaagtagcagagtagcgtttgcctttcgacatgaactgctgcagtggtaacatgactacattcgcccaatcagccggttttatctcaattaaagcaccctttatattaccaggaatatatgctttaatcattttgtcagcgccagcaaatcctttaacttggctccagtttatctttaatctggtcttattagatatcactggcgtattagcatactgtttaagaagttcttctaaaaactgctgacgagcctttggcggaatgtagtgaaggtttaacccatacatcaatgtggttgtaccttgctttccaagaccaagataaactatcaaaggaaatttatcccagaatggaagagtgtctttgtgcttagcgtcatacatgtaagcatatagctttccaggttgaggcttggttacagaatgaccacgtatatttttctttatagtttctgcaaaccatttagcagatttattgtttactgctgcgccttcattacgaattttatctttgatagagcttcgaaatgaatttaccatcacaagagcacgctcttgtttggtcattttgttagcaggttttttctcaatttctgctactttaattgccgttttaattcttgatgcatgacgagccattgctttactgaacgtagcaggatttattcctttgctttcagcgaatgatttagacgtcatgccttttttacgagcagcagagtattcaactcctaatgctacccattgattttcactacgggatttagctttaggcgattctgtagcttcagtgataaattcaaatatagccatcagcctttccatcctaattttttaagtgaatcttcggtaattaacctaaattctatacccattttactggcagtagcttgagctgctttccacttatcaacgtttacagaccaggtgtaaatttcatcaatgtaccgtttcttcgctgatgtcgtcaactttgttggtttgaccggaggtctagtttctttctttggcttaacttcaaaaaagaactgttgaccattagaaaacttagcccagaaatccataaaataccggcgtttctttccatctgcattactaaagtatggaatgactacttcttcgctattccattggactacatctggatgattgtcaagccaacgcatcatgtactgttcccatgtagaacgataagtaatctttctaaagtcgcctttatatttgtggagattctgtggcatgaatttgccagaatatgccatagtggcctccttataaatactgttattaatatttataagaggataaact

SEQ ID NO: 52 - DNA, 48149 bp, unidentified
  source 1..48149: mol_type = genomic DNA
atgggggaagaaaaaagcgctacgcagtggctgcgcgtttttattctccccaccatgccgtataggggtaaactgaggcagagccacttgaaagaggaaaccaacatgactgacaaggtgaaggtgacgacaccgcggaacccagtcggcagaccaaccagctacaccgaggacatgccggaaaaactccttgaatatttccgcgtcgacgttgatgactatatccagcactcacttacggcagccgggaaaagcaacattcgcattaacccgaagcacatgccgtctattctcaacttctgcgaaagcatcggcatcacgacgacaacgtttcatgactggcgttcgaagcataaggaatttgctgtcgcttacacgcaggcgcgcgagctttacgagcagatgattctgaatattggcttcgccacgaacagcactttcgcgaccttcatgctgaaagcgaacttcggctaccgcgacaacactgagatcgtcgtgaccggtgacgccaacaagccggtgcggttgaagatcgtcagcgagcggccgaaggaggagaagccgcgggaagagtcagaagctgtcgactggggtgacgactaaatactgcttgacatatctatgactgcgcaggaatataggggccgggcaatcctgcccctactgcacaggacatcaaaatgactgaatcactgaaattcacctccccggcaccggcaccagttagcgacgttctcgtttgcgcttccagaaatgcagacgcagagaatgacatcagactggctcgcgccattgatgttgagctggacggtcgtggcaccgagcagcacgttaagatcaaggtcggaaccctgcgtgtgctggccgatgccgttatgtcactggctaagcagaaggtatcgcttgaggccgcacttgttgaacgcaaagaagacctggctttagtaaatggacagctgaacgaatggcgcatgcacacccggcacatcctggatacctacttcgccacctaccccgccagcaacgccaacgacctgaatcttcgcctaatcatgaagtcggagatccagagcgcgtacaacaaaaacaagcagctgaacaagggctatgacgccacgcgcaacagcgccgacgcatcagaccagctgcggaaggcagcagagcgggagcgggacgacgtgatcaacctcaaccgcaacgcagcggaagagatcacccacttgcaagaacgcgccaaacacctcgatcaaaccatcgtcgacctggtgcgccagcgcgacaagaacgggcagcaggctaaccagctggctaacgaactggtcgagaaacgcaaggagatcagcaggctgttagaaatcattgaccgcctgcacgcagagatcgcagagaagcgcgacatcatcggcgcagcaacgcaacgctgcactgcgctcaccaatgacgcgaaggcgatgagcaagaataacagcgaactcgcagcacgcctggctaacgctggcatggagatcgccaactataagcagctcgcggaagacctgaaagcaggcaccgcctttgaccgtgacaccgtgaagcgccaggcggacaccattgatcgcctgtatggtcagctcaatgagtggcacgactgggctacagacgtcatttgcagcccgtcatcaatgggcgctgaggctcaacgtaccgccatcacctcagcaatgcgcaagcgcaaggagcgcgttgagacgctggaggcgaccgtgaaggccatcgcagcacagcgcgacgcctgggtgctgtgggcgaagagctacaccgacacctgcgccgttgcgtacactaacgagcaactgctatcgctggtgaaggcaaaggtgaaggtgagcacggtggacatcgacgggaagcagaccatgtgcggcacactgaaagtcacccagctgaaaggggatgtcgttgccagcgatggaagctgggccatgctcaaacacggaaacgcggtgatcgccggaagcattccagccagcaagctgaccatgggcgaggagatgaaagaggccattcgcgaagtcgtccgggaggagatgagcagcgcgttaaagcaagccatcaagaacgaacttgacaagctgaccatgtaacccatcaaatcattaaccagcggcccccagcgggccgcaatgaggtgacataatgcagaccttctacctagtctttagcgccattctgtgcatgttttgttttctctgctgcaaagggtgggcgacggccctggatatcggagccgggaaagacaagcgcatgatcaggatggctcgcaccttcgacatcgctggcgacgtgttccgctgggcgtgctggctgttcatcgtcgcgggcttccttcgcaccatcggattgttctgattgcttacactttgtaccatttgcccggttgatcaccgaagtgactgactgataggctttaatgagactcgcagcgaggtggaaatgatggggatcgtaatgggtgtgtggttggcgctggtgacagctatcgcgatgatcgcaattcacatggccgcaatggacagggagcggctcaaggccaaccaggtcagccagatcaccaagctggtgctcgcggtcttcctcctggtcggcgtagcgcacatcgctaccaggtacacagctttcctccgcgtgctatcctgacctgacaactgctatcatggccccgttaacacaacggggcttttttatgtctatccaatctgacgccagtcaattcattgacctgacactcacaccacctcagaacgactttctgcaactgtcgtgcaaacacccggccttcgtggcgggcttcggtacaggcaagagtcagaccatggccgtgtcgtccgtgcttgacgcatcagagggtggcgcagatgccacgatcgccatccttgagccaacgttcgacctgtgcaagctgatagccgtgccgcgtatcgaacagatcctctcagagctgggcattcgctttaagaccgtcggcaacaaggagatctacacctcccacggcgggatcggcgactttctctttcgctccatggacaacccggctcgcctggtcggctgggaggcgttccgcatccactgcgatgagatcgacaccctcaagaaagaggccgccaaaggggtatggcgcgcagcaatcgcccgctgccgtcagtcaccgaaggagtatgagccgttcgacttccttccgtcagaccgcccgctgaacagggttagcgcctactgcacgccagaggggttcaacttcctgtatggccgctgggcgaaggacaaggagcgcagccgaaaggccggttatctcatgatccaggccgccacctcatccaacccattcctgcctgccgactacctggacgccctgcgcgccagctacgacccgcagcgcttcgaggcctacgcgaaggggcagttcgtcaacctgaaatcggggacggtctataagaactttaagcgcgagctgaatgacaccgacgtggagatcatccctggcgagacgctgatcgtcggccaggacttcaacgttaacaagatggcgaccgtcgtctacgtcgagcgctatggcgaggacggccttgccgaactgcatgcagtggatgagcgacacaacggcatcgacacaccggatgtcatccgctggctggtcgagaagtaccagaatgcgggaaatggctacatccacccgatcgaggtctacccggatgcgtcaggcggaaacaccagcagcaagaacgccagcatgtcagacctgtcgatgctcatgagcgcagggttcgacgtctactgtgggcaggctaacccggccgtgaaggacagggtgatcagcgcgaacaccatgttctgcaacgccagcggccgccgtcggctattcgtgagcagcaagcggtgcccgcaattcgtcgaatgtctggagcagcagatctacgatgacaagggcaagcctgacaaggaggccgggaaggatcacatgaacgacgcaggcacctacccggtggtctataagttccctgtcgtgcataatggcacgatctcagcaaataatattgaatgggtacgatgatatgacgatcacgacactgccgcaggcggggacggtatccaccgaacacccgctttacaagcggtttaaccaggaataccgcactatcgaggactgcgttgcaggacagacggtcatcaagcgtgccggtgttctgtacctgccgaagcccgaagcgtggacaatgaagcgttacaacgcgtacaagcgccgcgcccacttcctcaacgccacctatcgcacgcagatgggtatggtcggcatcgcgttcgccaaaccggccacctacaccttgccgacggccatcggctacctgtcgaccgacatcgacggcgaggggctggacatggatcagctcgttcgaatgtgcgtagcgcagaacatcaccttcgggcgcggtgggctgctggttgactatgacgccccggaggacgtcgggcaggtgactacgctggtcaatagtggccgcgcgactatccgcatgttcgaccaccggcagatcatcaactggcgcaagagcggcggcaaatattcgctcatcgtgctgcgctacctggacgacgtcgactacgacggctttgagcactatcaggtggttcgctaccttgaactgcggctggtggatggcaaggcatattcccgcctgtggacggacgaactacagggtgccgccgggctgccttcctcggtcattcagcagaacgggaacatgaatcaggagcagccggaactgcgcccgatcatggctcgcggaaagcagctcgactatctgccgttctgctggttcggtagcgagaagaacgacagcgacattgacccggctcctctgtcagacatcgcgaacaccaacatcgcccactacaacgccgacgccgacaacaccgacagctcgtttatctgcggccagccgaccttcgtgatcgccggtgtgcctcagaacttcgtgaaggacaatccgagtatcaaggttggtggtgacgaggcgatcattctgcaatccatgggcaccggcacgcctaccgccagtatggtcgttgcaccaccgaacaccccggccgccgcgctgctggagaagcgtgagaagcagcttgccatgctgggcgcgaagctggttgagcgcaacggggcaacgaagaccgccacccaggctggcgcggatgagaaaactgacaactcgatcctgtcccagtgcgtcggcaacgttgaggcggcgttcaatcaggcaatggagatggtgaaggacttcaccggcaccgaaggagcgaacgtccacatcaacaagcgatacgaagatatcgtgctgaacccgaccgaactgacagcctacatggcggcggtgcagtcagggatgatgcgtatgatcgacttcctcgcgtggcagcagcgcatcggcctgatcccgaacgacgcagatctggaagacgttgaacaggagctgaaagacggtgccgaagaaacgcagctgatcttcaacgcggctgctcgccagacccagcaggggctggacaacccgccggaagataaagacccggaggaagacaagccgatctctaagaagaaggccagcgcgccgaagaagggggctaaatgacatccgttaactcgcggatggcgtcggaggcggtaaggcaccgcctctacctctaccgctacagcgaaggccaggcgaagaagatgacccagctactgcgccgaatgtccgtggacgtggtcggccgcctgctgtacgcgctggacgactcaaagatctccgccgacaactacacggtgaagcgtcttgaggccatcaaagcagccattaacccgacgatcaaccgcatctacaaaaccacctacggccagctcaaagccgaccttgaggcgctgagtaacggcgagctggcgtaccagtaccgcacgtggcgaacgctcatccctaacccggtgctggacttcgttggcggactggtggagatcccggaaacgcaggtatgggcagcggcgaacagtcgcccgttccagggcatgcttcttcgtgacatcccgtcagtgttgggcgaggccatgaccgactcgatcggtcgggcggtgcagcagggcattctacagggcgagacgtatgaccagatcattcgccgggtcaagggcagcacagcagcggcctacaaagacggggtgatcggcaccaacgagcgccaccttgccaccgtcacccgcagcgcagtgtcgcacgtcgcagctgaggcgcgggacaagatcggcgaggcgaacgcaccgctcatcaagtcagaacagtggctatcgacgctggacaataagacgtcgaagctgtgcatcatccgcgatcagctgctgtacatgcgggacaagaagcacacgccgatcggccatagcgtgccctacggcgctggcccagggcgtctgcacatgaactgccgcagtacatcgaccttcgtgttcaagagctgggaggaattgggcgtcccgggagtcaagatcaagggcgcgtcgcgcgccagcatgaacggacaggtgccgatttacatggactattcgagctgggtggggcgccagcctatgagcacgttaacgcaggtgttcggcgtggagcgggcgcagctcatccgcgacggcaagatctcgcctcctgacctgttcaacgacaagggggagtatttaacactcgcccagcttcgcgaccttgaccgtatcccggcagaagactaacatcgtgccgttgacaatacaggagctatcacatgtggaaatatctgattaacaaagaagcgtttgacgccctcacccctgagcagcaggccgcatacaaggcagtcggtgattctggcaactatgtgatgaacatcgaaggcatgcctgacgtgcaggccatgcagcagcagatggctgatcttcaaacccgcctgggcaccatcgacgcagagaaggccgccgaagcagagaaggcccgacaggcagcgcttgacctggcgaagaagaacggcgactttaagaccatcgaagaggactataagcgccagatcgccgacctgaacagcaagatcgagggcttcggcaagcagcgccgcgacgacttcctgaacgcgcagatcgataagctggccgcagagctgggtggcaaggagtatgccgcgctgttcaaaccggcgttgcagcagcgcctgtctgtcgagggtggtgaagatggctccgacttcatccctcgcgtgctgaaagacggcaagccgtcggcgatgtcactgaacgacctgatcggcgagttccgggcagacccgacttacaaaccggtgtgcgtagcgcctgcatcctctggcaccggccgccatcaggcaccgaccccgacgccttctgcttccgacaagctcccgagttttgaagatgtgcgcggtaagcagctgagccgcgcagaacagatcgcggcaagcatcagcgacgcagagtaagtaagcacaggcccggcaatgccgggctttttcttgcttgtccagtagttgccggttatcatccagacgtttaatcactcaaaggacatcgcgcgatgagctttactatcttccaacgaaaactgatcggtacgaccgttcagcttctgactgaaaacctgaacgtgttcaacgcggcttccggtggcaccatgcttatcggcagcggcgaggttatcaaggaaaccatggagaaaatgaccattgggatcattgacggcctggtgcaggatcgcaacgaacacgccccagttaacactgtggttcagccgaaggtgctttcccgcatcctgggcggttccatcaactccgctggccgccttgggccggtagccatcacctccggccagctgcgactgatcgagactgacgtgaaccgcgcggcagccgagatcgcaaccctcgcgtcggaagccatgctgaaacgctacgtgacagtggcgatgggtgctggcgtggctgcgatcgaagcgttcggtcatggtatctatacccagggcgcccacgtgaccagcaaggccggtgagctgtatccgaccgtcgaagacttcccgctggcggcgtccatcttcggcgaccaggccgacctgattcgcacctggttcatgtccggcacccagtgggcgaagttctccgcccgtgaagcggtcaagtccgccaagctggtatttgagctgggcaacatgaagatcttcaccgatggcttcggtcgttcgttcgtggtatccgacgcggcaagcgctggcatctctgcggcgacctccggcggctccgcgatctacgcacctgatcatgcgattgttggtctggccgccaacgccattcaggtaacgaccaccggcctcaaaatggctgctgacccggccaagctgggcggcgagaacattgaaagctggtggcaaggtgagtttaactacagcattgctctcaaaggcatgcgtcctaccatggcgttccgcaccgccaccgaaggcaagaagactccgaccatggccgacctggtcaagaaagagaactgggaagccgagaagggcgaaaccgaccgtaagccggttggcaataacgccgatccggtggtgccgactcgcaacgtgcgcgagacgctggggatcattatgaagctgaccccaactaccatcccggcagcaggagctggtgcgtaagcgaagaagtgaataatatgggggccaatcggcccccttttcattggagcaaaatatgatcggcaatctggacgacctgaaagcattcgcggcggccaacggctacacgggaatgactgacgaagagctgagcaccgcgctccgccaggctaacctgtggctgtggtcactgtcatggaagggcgagcaggctgaacccggccaggcggacatttggccgcgcactatctgcgacgactacaactgtctcgactatgacaccccgccggaagtcctccgctttacttacaccatcgtgtgcgacgccgtcgactctggaacggagttcaacaccgcatcggctggcgcgcataagaaacgcacccggatcgagggcgctatcgatgtcgagtacagcgagcagagcctatacagcgcaggcttcgaggctccatacatgatgggcatgatcgggcactggctggaaggcaactggcgcggttgtaacgtcaagatggagcgctgataatgaacaagctatatcgtgaactgcgggcagaggcccgcaagctgttcaaagagtacggcgcagtcatcaccatcagcaccccgggcggcatcagccgcgacccagtcaccggcgaggaagtggtgacgccaccgggcgcggtatgcaaggtgctgggcgtgatcaccggcgtcgacctcaagttttgggggctggcaaccatcccgcccggggagcagcagatcgtcatggcatggacggacaccaccgggaaggagtgggagccgaagatgaatatgaccgtctcaggtggtggccgcacgtactccatcaccgagattaagccggttatcccagacggtggctacggcatcgtgtacaagctgaggatcaaggggctgtaatggcaagcaagcggaacggcacaatcttcgccaacaatgtctctcagtgggctgccggggtcgttgagcgtcacgaagagatcgtgcagctggcggcgatgaaggtcttcgcgatgatcatccagcgctcacccgtcggcaaccctgacctgtggaaccgcaaccagcaggccgtcaaggagcgcaaccgcatgagcgacctacgaacggccatgcgcgaaagcgacacattcggctacacgaccaagcgcggcacccgccgcctcaagccgggcgcgaacatcgttgcagcaccggcgaaattctcttcccctgtcgggccagtcggcccgcgcataccccgacttctcaagaatgagcagggcgtcaacccggtcgggaagggctacgtcggcggccggttccgggctaactggcaggtggggatcgactttgtccctattgagtggctggatgaacgggacaagtcaggcaccccgaccatcaacaaaatggtgaacgccgtcgagcgcttccgcgtcgggatggctgagcatatttatttcgttaacaattcgccgtatggctacccgctggaatatgaggggcactcacgacaggctcccgccgggatggtcaggatctcatgtatccaatttgaggaagcattcgcggcagcaacagcagaggcacaaaaattatgatcagcacttcacagattcaggcaaaattcgacctaatcgcaatgcagtggggtaacaacaacaatatcgcccttgtgtggcgtaacagcgccgataacgacatgaacgagcaggcggtgagtcagctggtcggcttcccgcagcacatcccggccccgtctatctccatgggcttccagcagtcagacctggcgaagcgcgggatctatcaggtgatgctgcgtgctccgcgcctgtccggcacccggcagatctacgatgcagccgatgcgctggtggaggcgttcaatgaagcgatgttctatgacggtaattatgttagcatcggcgacgacgatcagcagctataccttacggcaccggctgaaatcggcgctgactatgaagacgacgccgggctgcatgtggctgtcacgatgaactaccgtatcaacaacgtaagaggctaacatggctacgaaactctcatacaacatcccgaacggctccacgctgcaaatcgctaagacgatgggcgcaagccttgccgtgtcgggtatctccaacgcgaaagaggcagtagccacccttacagctactgatccaggtatcgccgctggcgactacgtccagctgtttaccagctgggtcaatatgaatggcctggtgtgtcgcgtgaaggcaatcacctccggcaaagtgacgctggagaaggtcgacacctccgacaccgacatttacccggcaggcggtggcgcgggtacgctggtcaagatcaacgcgtggatcgacctgccgttgaccccgaccatatccaacgctggtaacgagcagcagaccaccacgttccaggctatccagcacgagcgcgcggtgaacatcaacacctataagtcggcagcgacgcagactttcaccatggcgcacgacgccagcgcgccagtgcgtgaagtgttgaagcagctggatcgcactcaggacgtgacggcgttcaagttctacaacaagcgcgcgaaagaaacgcgcgtttatggctgccaggtatccttcaacgagatcccggcatccgaagtgaacaacgtcgagacgaacagcctcgttctgagtctggtcagtgagatggtgatctatcctgccgcgtaaagcgtgctatcatcagggcggcttaggccgcctttttcatatctggagataatagacaatggctgcaaaattcaagttagtacccgctggcacgttcgaacttccgatcctgatcaccaccgtagggcaggatgagcctacagagctgaaattcacgttcaagcgcatgccactgaccgagctgaaagagaagcaggaagcgatggcgaagcgcgtgcaggagatggatgaggaatacaagggcaaaaagctgtccgttgtcgaagatagcgtgctgcaatatcctttgatggcagattttgtgctggacatcgcaaccggctgggagctgtctgacgagttcacgaaagagaacctgatcaccctgttcgataactacccgacggcgtttatgtcgatcagcgttggctaccagtccgagctgtggaagctgcgccaaaagcactaaccgccgcgattgagggtctgtatttccccgatccgccgcagcagctggtcgataatttcgggggggagctggaagactaccgtccagaagtggagctatcagcagagattgttgatagcttttatttttaccagcgtattgatacccaatggcgcacggggccgggcggtttaatcggcctcgactacaacgtgatccccgtcatggctgacctgtatggcgtcaagttcgatcgcctgctcatggatgacctggcaatcatggagggggccgcgatcagagttctcatgagcaggagtgatacagcatgagtgaaaacacagaacgcttgatcgtcgacgtcgacgccagcggggtcaacgcgggggccaaatccctcgcagaccttgttgacgcggcgcaggacgcaggcagggcagcggacgggctgggcgacaagttcgacaaggtgaagccgtcagccgactcagcagccgcagcggtcgacaacttcaacaacgaggcgaagcagacgcaggaggctgctggcgacgctgccgtggggctgtaccggcagaatcaggagcttcaaaacctgctcgaccgcatcaggccaacgcgcgttcagcttcgtgacctggcgcagcagcaggaggcactggcgaaggcgcaggctaacgggctgctgggcgcgaaggaagcggaggagtacaacgctatcctcgccaaccgtgccgggatcatcgaccgcaacgacgcggctatgcgcggtctgaatgtgacgtctgagaagcagaagacgctacagcagggattaaccatcactaccggccaataccgcgctgctatgggtatgttaccggcgcagatgaccgatatcgtcacccagctggcagggggtcagaatccattcctgatcatgatccagcagggcgggcagattaaagactcgttcggcggactgggcaacacattccaggcgcttaaacaattcatttccccttccttcctcgggctggctggcgcgacagcagccatcgctgcaatgggttatgcagcctacaccagcgcagaccaggccgatcgactcgctgcatcggtgacgctcatgggtggggcaggctttaagtcagccgaagagctgaacagggccgccgtcatgatccagaagtcaactggcgacagcattagcagcatcaccgaccggctgatcgagctgaacaacaagggcacgatgacagccgacatgatggagaaggtggcgatctcaacgtcgaagctgtcagatgccgggctggacgctggcgacgtcatgaaagacttcgataatctggtgaagaacccgatcaagtctatcgcggcgctcaatgagcagtatggcttcatgaccgaagcgcagatgaagcacctaatccagacgcagaaggagaagggtgagcaggccgcagccgccgaagcgctggacatctacacaacggccatgaataagcgggccgatgatgtggtggagaagactgataacgtcggtcaggcatggaagacgctgaaaaccgccgcgtcggatgcctttaacgatatggggatcgtgctgcgctcgtggggaaaccgagccgtcgacatcttcaaaatggtcaagctatcgatcgacgacctgctgaactatcttgcgcagatggacagcaaatttacgctgggcgttgctgacctgctggacaaggtgccgggcgttgatggccgtggcgttctccgggcgatggggatcgacgtcgaaaccgtcgagaaaaatggccgggagtccatcgagaagggcaagcagatcgcgaaggagttcgcggaggtcagcaagcgggcctttgagagccaggcagacgctgaggcgcgggcgcgcaacgccaacggcgctaccggcagcggcgctaccgatgagaagagcagggaagcggtcagcaagctggcgaatgagtcaacgaagcacaacaaggagaaggctgtcaccgttgcacagggtgatcgcatccttgagcagtatcaggcgcaggagctggcattacgggcgcagatcaagacgctgaaagaccgtaacgccttcgacgtcaacgcctccgagcagatgaagaactatcagctgttggtcgcgaagatctccatccttgagggcatccgtgctgacgccaaaggccgggcactcaccaaggacgaacagtcacttctggcgagcaaagaggagattctcgcgaaggccaagaccgtcggcctgctgggcgatcaggtcaagcagctggagcggcaggcgcagatcaccgatgagctgacccgcagcggcaatgacctgtctgttcaggtggcggccattaacgcctcatggggtctatcagccgatgaggctgcgcggctgctggagaatatgcagcgagcggcggccctcagggacaaaggcgcgactcaggagcaaatcgacgaggacgcacgccagcgtgaagcgctgcggcaggctaccgacgcgaaaacgcaggactgggcaggcggcgcacgctcagcgatcgaagcgtggggtaaggatgccaccaacacctcagccaacgtacagaaggccatcactagcgcaatggatgccgggctggactcgatcaactccttcgtgatgaccggtaaggcgtcgttcgccgactttacaaaatccatccttgggatgatggttcagatgatcaacaaatggctcatgttcaaagccatcaaggggatcggcggcgcgatgggcttcgatatgtccagcatcggattcaatgcgaagggtggcgtatacgacagcccgtcgctgtctgcttacagcaaccgcgtctacaccacgccgcagctgttcacgtatgacaagccgaagccgtttgcgaagggcggggtgttcgccgaagccgggccggaagccatcatgccactggcgaaggattccagcgggcgtcttggtgttcgtgctcagggcggtgctggtggcggcgtctccatcgggtcgatggaagtgaatgtcgaccagaacgggcaggcgacggccaacgtgtcagagtctggcaagctgggcagagcctacggtgatgcaatggccgcagccattcaggacggcatcgcccgggcaagctccccgggtggacagatctggatgcttattaacggtcacgcgtgataacctacagcctcccacataggaggctttttttatggctacattagacgcgtggatctggccgctggcggcaggtcaacaggtatcagtgaaagaccgcagccgatcgaacagcttcggcgacggctcacagcagaacgttttagaaggcatcaatccgttcattatggaggtgccctgctcgtggactggcaacgccaagaccggcaaccagatcctgtccttcctgaaagcgcacatcaccaacccgttccagatggttccgccgcatggcgaactgggcctttacaccgtgaaatcaggcacgatcaaatatgtcgcgctgggacgtgcaaccatgaacattaccttcacagccgagcaggccgtgggcatctacacaggggtgaaaggatgagcaacaccattttcgacgaagccacaaagctcgacccgtctggcaagatcatcctcatggagatcgacggaaccgagttcggcgcggggatcatccggggccactattgccagctcccgcacacgagcaaggagatcctcgacagcgcgaacagcacactgacccgtgatcagcttttcaactgcaaaagcgccaatactcgcggcaccgtcacgaagaacgaagaccggaacaccatcaactttaagtcgctgggcgtcgactcgaacctagttttgcctgagttctctggcggcctgactggtggcaagtatcaggtgatcgaggtggttggtcgctgggtaactccgccgccatcaactgacaaccagtatcagatctactacaaaaccgcagcgcatgatttttctcccggctacaccaagggcggggcgttggcgtcagtaacgaaggatcttggtgatggatggctgaaattctcgttcgatatgtcgaagctgagcgctggcggttcagactgggtaaacagccagattatcggcatccgcattgacctgtggcagcaggcggtcggcgagatcgagatcaagcgaatcagcatcctgaataagaacccgcacgaggttgacgcgtccaagctggcaccgaagtcaatctggttcgacaacgtagaatatggctattggccgtttatggttgaggggatcgagttcagcagcgagcagcaggggacacctaccctgtccattggcaaccagtcgggggtcgtcagcgcctacctgcgcgcctatcagcagatggtcggggcaaaggtcaagatcatccagacctacgcgaagtttctcgatccgcgcaacttcacagatggtaacgagttcgccgactcaatgcagcagtggacgcagctttactacatcgatcggccagactatgagggcgaagagtatgttcggttcgcgctgtcatcgccgctcgacctacagaactttcaggtgccaacgcgcagcatcacgacgttctgtcagtggcaggcgcgcggtctttacggcaaaggcctggacgccggggaagaaaacgggtgcagctggaaccgtggcacagctaaaaagtggtacgacaagcacgggaaccaggtggacgacatcacgaaggatgagtgcggcgggtgcattcaggattgccgcctacgcttcggtcagctggtgagtgacccgaaagcggccgttctggactacggaggttttatctctgtgcgcctgattgattaaacgcactgtatcgcgttctgcggcgttttcttgcgtaagacgtccgaacgtatggcctgacggcgttaaacgcgacagcgtgccgttcaggccctcagttttcgactgacgaagataagaatacaccccatagccatatataataaaaaccctcccaagggagttttatttatatggtcttgggtatgtcttatatgtatttatggtaataaatatatatacccataccacctagcacctgaaattaagcattgtaaatcaatggtttaaaatttcaggtggtgccaagtggaggcaaaaatgattgacgtaaacgacatcccggaacagcaattaacctatattaaacaacaccttacagagtgttcgccgcaagaaggctgcgggctgctggtgaattcaggcggaggcctcgaatactggcctgtcatcaactcagcagccgacaaaatgaacagttttcgcattgcaccgcaggacttcgcagaggctgaggacgcaggcaatatcgttgccgtcatccattcacaccctggcgctgacggtctggcgtatccgtcaatcctcgatcgccagctcatgcaggaaacttgcttaccgtggttcatctacgccccagacaaggatgagatggcggtgttctttgaggagccgaaggggctgctgggtcgtgacttcgtgctgggtgcgaccgactgctatggcctggtgatggcgtggcaccgttcgcgaggcatccagctccctgacttccgcaagccgtacccgtggtgggagaagggtgaggagcttttcacggatgagaacttttcagcagcgggatttatcaagaaggccgaggcagagccgggcgacatggtggtgttccgtatcgcgtccagcgtaagcaatcactgcgggatctacaccggagacgggatgattatgcaccacctaatgaaccgcaaatcgaccattgataggatgtatggcacctaccttgagccgcgcattactggtattctccgacatgagttactaccggagatcacaccatgggaaaccagctaagcaccatccgactgtacggcgaaatgggggcgcgcttcgggcgcgtccatcacctcgcggtcgactcctgcgccgaagcaatcagcgccctttccgccatcctccccggattcgatcaatacatgcgtgacagccagtcgcgcggcctgaccttcgccccgttcatcggaaagcggaacatcggcttcaatgagatgtcgcagccaatccctgctggtgaagagttccgcattgccccgatcatcatcggcaacaagaagggcggcctgttccagaccatcctgggcgctgcgatgattgtcgcgggcgtcgtggcgtcgttcattcccggcgggcaggctgtctccccttacctcgttgctgctggtatctccacggctgctggcggggttatgcagatgctgtccccacaggcgacaggcatgaagatccgggaggatgacgccaacgcgccgtcatatgccttcggccagccggtcaacacgacagcacaaggtaacatcgttggcgttttgtatggcgagcgtgagatcgggggtgctatcatcagcgccggaattatcgctaacgaggtacgttcttaatggaaatcaaaggatacaagggcgggagtagcaacgtgcatacccccgttgaagatccagactccctgatcagcaacgcaacggtaaggatgctcctggcgttgtcagagggtgaaaccgtgccgattagcgcggaagacctgcccaagcgcgtttatctggacgggacgcccgttcagaacgatgatgggtcggtaaacattccgggcgttacactggaatatcgcaacggcaccccgcagcaggagccgatcaacggcttcccggcggtggaaagtgaaacacgtatcaacgttgagctgaaaaagtcttctgcatgggtgcgtaacatcaccaacaccgagatcgacgccgtccgcatccgaatgaatttccggctggtcatccagcagaaggacggggatcgcgtaggcggacgcattgagtaccggattgaataccgcaaagtcggcgacagcgcctacaccgtggccttcaatggtgctgtcgacggcaagcagaaagacaactatgaacgcgatcaccgcatcgacctgccgaagagcagcactggctggcaaatccgcgttacccgcctaactgacgacagcaagtctgataccaccgtgctcaactccgggatcgtggctgtcaccgagatcgtcgacgcccgcgttcgttacccgtggacgtccctactgttcgtcagcttcgacgccaaatcgttccagaacatcccgaaaatcagcatcaagatgggcggccgtctggtgctggttccgtccaactatgacccggttaaccacacctatagcgggtcgtggaacgggacatttaagcaggcgtggactgataacccggcatggatcgtctacgacatcattctgcacaagcgcttcggcattggccgccgtatcccgtcctcattcctgaacaaatggacgatgtacagcatcgcacagcgctgcgatgagctggtgacgaacgccgacggcacgcagaaccgccgttacacctgtaacgtgtatatccagaaacgcgcgcatgcgtggagcgtcatccgtgacctggcgtcgatctttaacgggatggtcagctacagcaatatgcaattgcagttcgcgcaggatgcaccggcagaagtccgccatgttgtgacaaacgacgacgtcgtgaacgggacgttcgaatattcctacggcagcatggctaaccgtcgcgggatcgcgatggtcacttttgacgacccgaaggcgcactataagacgcagaccactgtggcgcagatcaaagacctcgtggagcgctatggcgttgagccgctggaagtgtccggcatcggctgcacggacgaatacgaagcgcaacgtcgcggcctgtgggctctgctgtcgaataccaacgacatgcagatcagctaccgcgtcggcctgagcggcatcaagtacctgatcggcgacgtcgtcggcatcgctaaccgctacgtgcagggcggtcagttcggcgggcgtgttgctggcgtatccggcaccaccatcaccaccgaccgcatgatctccgaccacgtggcaatcggcgacagagtgatcgttcgtcaagctggatcggatggaacctacaaccgcgtgatcaatgcaatcgcggctgaccggatgtccttcaccgtcgacggcgctaaccttgatattcagagcggtgaagtgttcctgctggatactaaggtgctggcaccggaactaatccgcatcaccaagatcacctacaacgagcaggacaataatttcaccgttaccggtctgcaatacagccactcgaagtatttgcaggttgacaccggcgcgcgaattgaagaccgcccgacatcgctgatcccgaccggtcaggtacaggcacccgctaacgtggtggccgaaggctacagtatcgttaaccaggggattcgctcagctaacgtaaactgttcatggttcaccgtagatcaggccgtcagctacgacattcaggtgcgccgaacctctcagtcaaacggtcagtggtcacaggggtggactaaccttgccagccagtcgagcacgtccgtagacctgaccaacgttctgaccggcacctatcagttccgcgttcgttccgtatcccgtgacggcgggtcgtctcagtgggtcgagtcgaatcaggtgttcgttgacggcaagcgcggcagcatcccggcagtagctggcctgaacggcgtaggcatcgttaacggcatcacatggcgttgggtgactggcacagatgatctgatcgatatgaagtcgacagagctacagttccagcgcattgacggaaatggcgctccggttggtgggtggatcgatctcagcgtcgtgacctacccgaccgggacgttcacacagtccggcctgaaatttgccgaacgcgtgcaggtgcgcgcccgctttgtgtcgtcatatagcgatgctggcgagtggagcgccccggtcatggcgatgacgtccgacaacatggacgactattaccagaacatcgacgacgcgatcaaaggctccgacacctacggcgaacttaccagcggcatcaaagacgtaagcgacagcgcacaggcagcgaaagacgccgcgcaggccgcgcaggttactgctgacggagcagtgacaaccaaccagcagcagcagcagcagctgaacaaccagctggccgagatccagaagaacgcgcaggccatcaccaacaccgctaacgcgggggcggcaaacgccagcgcaatcgctcaggagatccttgaccgcaaggctggcgacatcgcgaacgccaacaaggcagctcaggacgtggccgacgctatcgcgaaggctgagacggatgacgcagaagtggcagcccaggctgcggctaacctgctggcgacaaaaaacgaagtcgaagcgcagatcagcaccaccaataccacgatgcaggacggcttcgacagtctggctcagcagatggcatccatttccgctggtactggcgagcagttcgacagcctcgctatctggtatttcgacaacggcccggaagggtgggcttctgacgacgccaacaccaatctgctcccagtagaccaagatggctggatttacccagctggcgcagcagccaccatgcgctcaccaaacccgctggcaatcgacgcgcgcagctataagtacatgcgcctgcgcatgaagcgagtcgggaacccgtcatgggctggcaagctgtattggatcggtgttgatgagactggctggacaagtacccgctcgcttgctatcccggcacctgactttgacccgaccaccgggatcactgtcctgtcgctccctgatctcctgtgggcgacatccggcaccgtgcgccgcctgcgctttgacttctcaaacaatcaggacgccaataactactacgcgatcgactggatggcagtcggccgaccgaccccgggcgcgtcacaggcacaggttcaggatcttcgcaccgccatgacctctgcggactctgccgaagccgcagcgcgtaacacgctggccgtacagcttcgcgggaactatgagggaaccgacccggccaagctggtgactggcattatctacaacgaacgccagacccgcgtcaccgcagaacaggccatctcaagcgacgttaacacgctgcgcactgactacaacgccaataaggccgcagtcacccagcgccttgacacgctgaccagcgagaaccaatcgcaggcccaggctctcacgcagctacaatccggcctgactgacgccaacggcaagatcggcgcgaacacgaccgcgatcaatcagctgaaaaccgacgtgtcagacattgatgggcgcgtgacggctaacagcagtctgattaccggccttgagagcacgattaacaacgacgctatcgcgctggccgctaatccgaacaacctgcttacgaacaccggcttcgaacgtgacaaggcagcctggactggctttaacgcttacgctgatatctatgcggctcaagtcccgcattcagggtctaaaatcctgcgcggtaaggctggcggcattgctggcatcactcagttagtggctaatgtcaagaaagggcgcacctaccgcttcggcggatatgtcaagcgcagttcagacatgaccaccggtgcggtaggcaataacaaatttagactgggaaatgcggatacaggcgcaggcccattgtcagaacttaactacacccaaagcaatgttggaaccaactggacgctgctcacaaaggactatgtcccgtttagtgacatgacaatggcattcagcatcaattggattcttaactcaggcgagatctattttgatgatgtttttttcatcgacgtaacagatgaaattaacaacgccgctaacgccagcgccatctctggactgactacgcgcgttactgccgccgaagggaagatctccactaatagccagtcgatcacccagcttaaaggcgacgtaagcatcttgcagggacagatcgcgaacaaggccgatgcaagcgcgttgcagcaactgcaaaccactgtcagccagcagggtgacaagctggcgtcgcagggtagcgccatcactgaattgcagaacacggctcagaatggtaaggccaaatactggcttaccaagatcttcgatatcaaggtcagcggtagcgggtacatcccgaagctgtcagatctgtccggtgttccaccgctggccgtatccgagatggccgacgccgcgaagctggattttctgacttacggcgactacaaaatcgcctacgcgaagtcgctggtttacctcaacgctgacaagaccatcgagatcgccccgggatcacgcattgttgacgacaccggccgcctttatgtgaacggcgtcgagactgcgtcctttagcgcaagtgctacaaaatactcgttcgcgcttaaaaagggctggagcacgattgaattcgtggttgcgaatatcaccggtcagttctttatcaacctcggactcaagctgtccgacaacgtcgatcagctgttcagtggtgccggtcagatggctgcggcatccgctgcgcaggtcatttcctcgcaggtagaacagaccgccgggaaggtcgacgcgaacagcagcgcaatcctgaccctcaataactcggtgaaggatatcaacaccgcgttaaacaataaggccgacgcaagcgcattgcagtcactgacgactcgcgtaagcaatgccgagggcaagatcacatcccaaggcaacgccatcacccagctcaccaacgacctgtcgacggcgaacggcaagatcacggctaacactggcgcgattagcagcctgacctctcgcgtgactgcggcagaagggaagattgactctcaggctgaatcaatcacctcgatcaactcatcgatcaaggggattctgacgcaggccgctaacctcatccctaacccgacagttgatccggcatacccgcaaatggggatgaccgtggtttctaccacgtcggaaggtgttcctgccggatgcccttacgcgtgggcgatcaagtgtcagtaccgcgatcacgtcccggtgatgaacaacatcccttgccgcgaagggcaggtgttcgagatttccgtactggcagcgtgcggcaccgggacggcaccattccaacactacatcgggacgtcaacgcaggtatcgggcagcatcggccagccgcaggcgaacggcggccagatctccgcagcaaccggcgcacagtggacgcgaaccacatggcgattcaagccgaacgccacgcacgcagcaaaaggctatttccgcccgttcctgcaaatcaaccaggcaggcccggacttcggcactgtatggtacgccactgactggcaggtgcgggacgtcaccgcagccgcgaacgcagaaggcaaggccgacgctaacgctacggcgattagccagctgacaacccgcgttacttctgcggaagggtcgatcacgtctcaggggcaggccattaccaaactgaccagcgatctgagcacgctgaccggcatcgtgaacaataaggctgacgcttcggcgctgaatgcgctcactacccgcgtatcgactgccgaaggcaagatcgattcacagggccagtcgatcaccaagctgagcaatagcctgtccgcaactgacgcctcaatcgacgcgcagggcaagatccccgggaacctgctggctaactcatcgtttgagcgcggcccggttaacttcaccggctggagcagccttgccaccatcatcacggcaacacagccgcattctggcaccaaaattgtcaagatggcggcaggcggaagtgctggaatcagtcaggccgtggagatcacgcaggggcgtcgctaccgcttcggcgtgtttgccaaacaggacgccgggactgtcatcaacgatccgggtaacacgaaattccgtatcgctgacgcatcaggcaatcttcttatcggtacgaactacggcccgtttacgtctgaatggcaacacgtcttcatggactggacggccacgaagaccaccaacgcgctgtttcagctgactaccgcactgagtgctggggcgatgtatttcgacgacgtctacgttgtcgacatcaccaacgacaccaagattcaggcgaacactgacgcgataacctcgctgaacacgaaagtgacccagcagggtaacgacatcacgtcgcagggcagcgcgatcacccagctgaacaactcgctgaaaactgtgcagtacagcaacagcaatccgtgggtagatggatcgttcgagtcgtatgacaaccagcaagccatcggtggatctaatgccctggtcactactgacttctcattcagtggtcagaagtcgcttatgtgtcgccgtggcaacggtgaaaacggcaactctgataagactatcggctatgaaacggctattcgagaaagcgccgtgtaccgcttcgaatgctgggcgatgatgcctgaaactgagacgccgccggaagggtggaactgtgttttgggcttgatggttcgcacctcagccaatcagaacgcatggcctggcgcattcgtcatcacagagtcagggcttgctgctggtggtggtcgcggtaagtgggtcaagttctccggtaagctcggcttagacggcgcaaagaaaacacgaggtcgcctgtggatctcctgccgtggcacatccggcggcccgggatatcgcatctatatcgacgatctggtgatcaccgacgttaccgatgcgcacgcggcgcagaccaccgcagacgctaactcaagcgcgatcagcagcctgaccagccgtgtaagcaccgcagaagggcagatcacatctcaggcagacgcgatcaccaagctgaacggtgacgttagcaccatcaacggaacgctgagccagaaggctgacgccagcgcagttaccgcactgcaaacgcgcgtgaccaccgcagaaggccaaatcgcgagcaatggaacggccatcaccaacctgaataacggtctggaagcacagcgccgcaccggtgaaaacctcgttcagaactatgacttcatgcaaggcgacaccgcctacaacgtgcagaacaccagtaaggtgactttcggcgactatggcgatggcaaggtgggcgtgcgtatggtgcgcacagacggcaactcgcctggcatcttcgcgaacaacaagaatccgatccctcagaacgggcagcgccgctaccgttatgttgtgcgcgcgaagggtgtaagcggggctatgaaccttcttatgcgtcgctggaattacaacggcgccgtagaaggctcttataccgacaagaacaacacgctgacaactgactggcagaccctgacatgggaaaccgatcttaccccggcaagcggatttgacggctcagcgttcggcctgtattgccacccgtcaaacgctgaggtgtggatcgactcgttcaaggtgtacgacatcaccgaagagctgacgatcaaggccaacagcgcggcgatcaacagcctgaccaccaccgttacccagcagggcaaggacatcaccgcgcagtcgaacgcgctcacgcagctgaaatccagcctgactaatgacgcggtagcgctggcgacaaaccctaacaacatggtcgcaaactctggctttgagcgtggaaccgataactggagtggctttaacgcttacgcggatatctacgcggctcaatcgccacgaacaggcgcatatattatgcgcgggctttctggtggtagcgtggccgtttctcaggtcatcctcggaatcaagaaaggccgcacctaccgttacggcggatacgtgcgccgcgattcaaacgcgactatcggaaaccaaggcaataacaagttcaggatcggcaatgccgacactggagctggccctattcatcaggtcgaatactcgcaaagtaacgtagggacaagctggactcttattactggcgattgggtgccagcaagcgatcaaaacatcgctttcagcattaacgttcttttgactgccggtaacttctactttgacgacattttctttgtggacgtcaccgacgagatcaataacgcggccaatgctacagccatcagcaacttgaccaccagagttactacggcagagggcaaaatcacgtcgcagggaacggcgatcactcggctgaccgcagacctgagcaccgcgaacgggaagatcacggcgaactccaacgcgatcaccagcctgcaatcgactgtcacccagcagggaaacaccctgacctctcaggggcaggcgattaccaagctgaatagcgacctgtcagacctgtcaggcgtggtggacacgaaggccagcgcttctgcgcttaacgccctgaccacccgcgtcacgacggcagagggcaagatcaccgccaacaccacggcgctgaccagcctgacttctcgtgtcggtgatgcagagtcggcgatcgatggcctgaacgagacgacagcggctaacggtctggcgatggcaaacggcttccagcaactgcgtgcgcagatcggcgacaaccaggcggccatcacgcagacgagccaggcaatggtggatcttgagtcttcaacggctcagcagatcggcacaatcaaggcgtcagtggatggtatgagttccaccgttcagcagacttcaacggctgttgcggatatcaacggcaagctgtcggcgcagtggggcgtcaaagttcagactgacaccggcggcggaaacccgcgcatagctggcattcagctgggcatcgacgcaactggcagctcacagttcctggttcaggctgacaccttcgcggtgtacgctggcggcagcaacaaaacgttcccgttcgtggtgcagaacggcgtggcgtacatgcaggaagcgctgatccgcgatggctcgatcaccaacgcgaagatcggcaacgagatccgctcgaatgactttgttgacgggtcacgcggctggcgtatcgctaaggatggctcttcgcagttcaacaacgtgatcgttcgcggtgcggtttatgcgactgacggctggttccagggtacggtatatgcgaaccacatcgagggcgacatcgggtcatttgcgatcaacatcgctcagcaccgcacgcgcaaggtgccgaaggctacatggcagtggtttgagctggcccggttccggcggcagaatttcgaccaggtgatcaatattcgcggtggactcctccagacggatagcatcactatcgacggcggcgcgaaactcagagcggggatgtcctacgcgccaggggctgacggcggactgaatcctggctatctgtcgtatgcaatgcttcttcgtggcacaggcgctacgtctggtggcggcagtatggagctaggcattgagcttatgtatgaaacaggtggagcaacacgcctgttaacggcgcaagagtcaatgaacgtagacaacatgtcatttgtcgtccctgccggtactggcgacgctgttctgcgatatggctgttacctggaccgtaacggtcagatggttttaaccatcctttcgcggttcgacgccttctctgcgcgcaacaacaacgtaattcgtggttcgtcatcaccataactggaggcggcccctgcgggggccgatattgaatggcaaatattagcgatcagctcgcggctgatattcacaacgcgtttaacaaatactacacagacctggcgaaccaagatcagatcttcttcggcgtcggtgacgtgaagattacgaagcaggacggcaccaccgccactgtgcgctcatggaataaggtcattggctcagtggacaccgccgcgcagcgcggggcggagaacacttttaccgctgtacagacgttcagtgctggggtgaaggttaacggcaacgtcaactgcatggccgacaacgcgatgatctacctgggcaagaactcagatcttgcgctgcttaaaaagagcgggcagggtggaaccatcgccgtcggcagcggcacgacgtttaagatccagcgcacgaacacggcgacagtatcaccggcgtcgacggtcgaggacattctgaccatcggcacggataagaaaaccacggtttccggagcgcttgccgctggtggtgatgtaacggcgaaggggaacattgacaacgctgccagcgggaagatgtattcccaggcgattgagctgtcatttagcacgccatacatcgactttcattttaactacagcaccgacgacttcaccgggcggattatggccactgccgccgatcaaattagtgtgcaaggtagtcattggcgagttgacagggatcttcgtgttggtggcatggcagatattggaggctggacgcaatgccgcgacgacctttcggccaacaaaacagactttggatcccctgctattggttcgttggtttcaggcggaaggattcgatctcgaatgctcgggcgcggcggtaacgttgacacctccggggcgtggggcggtttctatgttgaagagtatgtagggacagaacacaggatcatcatgtatatggacggcttcgggagaacagacgcatggtcattccgctcaggtggcacgatctccacacccaaaggcgatgttctcactaccggttcagacgtgcgcctgaaaacagacttcacccaagcgcctgagaacgcctgtgagcgcatcgaacgattaggggtatgtcagtaccgtatgaagggagaaagccgcgtaaggcgtggttttatcgcgcagcaggctgatactgtcgacaaggtctatacctatcaggacgttgagcaggagatcgacggcgagcgtatcaaggtgatgaacgtcgactatgtggcgatcatcgctgacctggtggcttcggtgcaggagcttcggcaggaattgaaggagctgaaaggggaataaaaaaaaggggccgatggcccctttctttacagcacgtgataaagcacgttgatcacgaagcccaacactaggccgatcgctgctgccagtaatggctgtttcattttgtcaaacacgttattcaccctctactttaacgagttcatgccattcgatgcccagtggcttcgcaaggcggatcatggtttcaatggtcgggaactcacggccattgtcataacggcatacgcggcactgcgcaatgcctgccgctttcgccaggccacgctgggaaaatccagcgcgctcgcggtgttctttcaaaatcagtgtaatgttcattttctacctcagaacgggatatcgtcatcaaagtccatcggcggctcgctggactgctgctgtggttttgactgctggcgagctgggccggaatgtgtcttcggctgtccctgcagctgcccctgctgtccgccttcgctcttgccgcctaacatttgcataacggcgttaggcccgttcagaaccacttctgtcgtccatttctcgactccgttgctgtcagtccattttcgtgtttgcagctttccttcgacgtagatctgagaaccctttttcacgtactcgccgacgatctcagccagcttcccgaagacgacgacacggtgccattccgtttgctcctttacttcgccggtctgcttatcgcgccatgattctgacgtcgcgatcgtgaggttagccaccacgccgcctgacggcatgtagcgaatttctggatcctgaccgatgctacccactaggatcaccttgttaactccacggcttgccatttataacgctccttaaaaatcttcttcgacgtctgattgctgcggcggtacatcttgcggctgaacgtcatcaggtgcaacctggacggtagccttaccgcgtttagcattggctggcttgccggggttgaacggtctggcctccgcgtttttcagctcgacgatcttgctggcgcgggcatcttcgacgatgcgcagtgatgccttgtcgctgcggaacagctcgcacgcggcgcggtagattgcatccacctcatccttgtccttcgcggcttcaatggagcggcggcagtcggctgcgctacgcactgatttgttgccatcgtcgtcatccatggtgaggccgaagatcgaaacgcgggcatagcggcgggcgtaggtaagcgttgagccgaagccctgggcgtcgttcttcgccagcgggatctggcagatatcggacagccattcgcctgtggcaacgtggatgatgcgcgtctccatcagcatcacgttcggagcctgtccggcctcgtgcgtcggagactggatcatgatcaacccggcatcttccattgccgggccgatggcggccgcaacgtctccgagggtcgcatagtggtttttcaggtgctggttctgcttggatttcttcggcgatacgcacatatcctgcgcgtgggcaaactgcttaacgatggtgctgcatggctgagagaatttcatcatttggtcactccttatattgagggggtaatatgtcagtatattaccccggaatcaattattttttggttttcacatcttcccacaggtggcggaaggcgttttccaggtagtacggaggatcgaggtcaatcacgcttccgccgccgtaggtcggccacgtgtcattgtcccggcaccatttaaatgtggcgatggcttcacgcagctgcgcatatccaatcatcagagttttgtttgacaaggcgaaaggagcgacgacgaacgggctgctcttctcctgcgctaacaacatcgtccttctcggtttctggccgaaagccgccttaaacccctcgcgctgcaacgccattttcagcggatacccgagatcgaagcacttacgcatgaatctttcagggttggccgtgtccgtggtcttatagtccaccatgtcggcgaacttgctgatccagtcgaggcgcaccttgcagcgcaaaccctgatagctgaaaaagatcgagacttccgacattccgtcgacgaaatattccttaaatgattcgttattaaacagaacggcgcgcatctcctgaatgatgtcataatcctgcccgcgaatgccttcacgatcaccgcgctcttcattggcctttttcacgatgtcgtgccagaaaacaacgtcagttatcccaagagctgcggcggtattggtgactgtctcaattaattccggctctttcattttcgaataaccggcaacaccgtgttctttcaaaaatgccttcgcggcctcaagcgaggtaataaagttcggctgcggaataatatcgcctttatcgtcacgcttaataaagtcctctttctcaggcatgcggaaatattcacgggcaaataattccggctcaaggtgattagcgtgggccgcagttccgaataccagtgcgcgggattgctttttcttttcctctgcgaacttccagttagccgggcatgtggagaacaactcccacaagccggagccgttcatgtggtctgtctcagcgtgatagtcttcgttcgacagatcgttattagtgaagaacagaacttcatcatcttttagcgatttaatatctgacattacatgatccccttattcatatctaaccgaagttttcgctcgatatcttcctgcctgacaaagcggcgtgaatcgcccttgcaattaactttcaatagccatttgcttttattctcaatagccggatacttcacggcaggatcgcggaatagaatctgaccaagcatcaactcggttccagtgggtacgccacaaaataaaacctcccatagcacgtccctgataagattatttcccggcgctctatatgtgagaaccactttctttaatgatcgcataaggccgtaagcctctttgaatgttttgcggtcagtgttgcgaatgccgccgtgcaatattctgtgtaactctgcatgtgtcatgatgacctcctgtgtggtgtttgggcatattacttccgcataataggccatgtcaaggctatttaactatgatggtcgacggcccgaggaagtcgatcaccgccagcttcgcgcagtgaaagccataagccaccgcagcgaagccgccctgagcggatacggcggacagacattcaacctgctccttgctgactggcgtcgacagctttttagtctctcgcttcatctcgatcaccccgaacggctccccgttgcggccacgatgcaggatcacgatgtcagcgacacccttgcgcagtcccttcgcctgctggcgcagaaaatactgcttgccagccgtcccgccgttctcgttcggcacgtggaaccagtacacgtctggataccaatgattaaaccatgtggtgaagttaatcaggtggtcatcctcaagcgccttcgtcagcttggttggtggatccagatattctttgatcacaggtcgtcacctccttcgaaaattttacgggctatgacgtcgcgagactttctgccgcctatacgccggtgcgtcacacgcttaggcgctgcaatcaggtgagcggacggcaggatcttcgtttttacccctttccgcatcttgccccgggtgttcggtgatgcaacgtgcttatccagtgccgccttccactgctgttttgctggcatgctgtcactgtccggccaaaacacctcataggctacgaagtcaggatccccctcattccccagcacgtagcggaacaccacgccgtttccgcatttcgtcggttcaacgttgaaggatcgcacgtccacaaagtcatcccgggtatagctctttttctcaaggctcctgtttgggtcgatcaacgtgttcccgcagtgggcgcactgccgggcggtgatgtcgttctctgcgccgcatccgcggctgacaaccacgcctcgatcgttcttaaagtcatcacatgtgcgcgagatgaaccagtagtggcagcgttcatcggcgctgtatggcgtgccgtcgtcctcgaatccgtcatggtcataaacatgtcggcagcggcgggcgtgcttgccgttcgtgtgtccataggggcattccttcgtctggccggtgctggtgtccgtctcatagcggtactgttcaaggaatggcgagaagtacagttccgccaggtcgtccagtgctccaccgtagtcgagaacaaggttgtcctctttgatcatcccaagctcttcgatgtggaatttcttgaggatgcgcatcccgcgaccgatgagctgaaccagcagagtgaggctgccgatcttgcgcaggataacgatcgtgtcccatggcgggacgttgtatccggtggtaaggcaaccgatctgaaagataaatttgcagcggttgttgaatgcgtcttccagtatcctgtcgcgctccttctgtggcgtgtcgtcggtgatgatcccgtaagtcacgccgggcggtaacgcgctggccgcctccttacagtgcttcttaccggcgcaggtaacgagtacgcagttacggttggcggtacgcttcacgacgtcgagcatgatgttttgcgtgatggttccctgggacaggatctgcttctccatctcgatcaggtcggcatcactgaattcgtcgtcaccctcttcgccgcgactcacgaaggaatcaagttggtaggtcagctcatcatcgatcgcgccgtaatgggtaggcaccaccgcgccaacttcaaccaggtactcggtggaaatgtcacacaccgcacgccgccagaatccgggggtgttcctgtcttcgttgatgatcggctgtgtgcctcggtagtcggtgccggtgtacccgataacaaccagatcccgaccgtacatctcccggcaacggcgctgcatctcccggatgataagcgtgtacccggtgcggccagcagcgatcatctgcgccaacgtgcgttctgcgttgcgctgcaacctctcgttttcaggattctgatccgcaagcgtgcaggtcatctcgctttcaacgatgtcgtctacgttgacgtgctggcattcgtcgatcagcaggaagcgcggcacgaagttagccagctgcttttcaagggcgttgaccaccgtcttctcgctgccgcaaatgatagggaaggtcgtggacttcatgcgcaggccagcgctgaacacgctgttctccaccccgaagttccgtatctccatggcgttctgcttgatgatcccgccctgacgtgacaacacgagcgcgggcttgttgagctgggtcaggcggcgggccactaggctgatcagcgtggtcttccctgccgacacggcggccttgacgacgaacgggccgatctccttgtagttgttgatggcctgagacgtcgcaaagtgtgccgcgaactggaacgggtaggggtcgtatggcatgccgcgaagtcctcgcagtagctggccgcgaaccgcctctatgtccgtctcctcaatcatttgcttgatgcttttcaccttttccactgttgcctcgttgacgtggtaaacattgcaatatattctgcacaacgaataccaaaacacaaggaatttaaaatgatgaatattggcaaactacccgaaccagaaattcacgagggcgcgatacagcgggcttttgtgcgttctatgggcaactcattccagatcatgatcccgaactactacacccctgacaacttgggctatgaggcggatatgttctgtatccgcaagagccgctacacggtggaagtggaggtgaagacctccattgccgacatgcgcgctgacttccgcaaggcccacaccgtttacccaaagacagcggaggaagcagaaaaatactggcgatcagacgaaaacgagcgcgtcccgtacccggtgaagatgaagcatgactgcctgcgagatggggagctgatagccaaccgcttctacttcctggtgccgtggactatcgcggacaaggcacgggagatcctgccggactatgccgggctttacgtgtacaaccagcgcggactggtacacgaggaaaagatggggccgatgctgcacaagcgtaagctcgatccgaaatatgaccaggggatcatggccaacctcaacacccgctacctgaagctgtggaggaggtcatgaagttctaccctattgagcagatagaacgactcatggtcgggcgctgggaggtgctgctatcccagtattgggataagcgcgcattcaacggcaggcatcaggcctgcccgctgtgcggagggaacgaccggttccgctggggcgaatcgaagcaggacgtcacgatgaagggtcgcggtgctgcaatttgcaaccagtgcggatcacacctgggcctgtggtggttcatgcaaactaccggctacgaattcccggtggcgctgcatgagattggggccaacttcctcaaggtcgagcctgaccaggaaatgacgaccgagccggtgatcgcccgcgacgcattcccgaaggctccgcgcgtcaggctggaagagaaaaacttatcagcctctcagaagtacatccgcaagcagcaggccgcgcctgactatgaccgccggttctggatggcctacgacctgatcgagacgatgcgcaaatatcacatgtgaaacacagttgacaggcatatggtgcccaagtaatatgcccgaacacccaacagaaggagcagcaaaatgtcagaacaaaccaccgtgtcaccgaagaccgccagcgcagtagccgaagaaatcaaaaaagctattagtcgccgccgtatcccggtaattgtcgcagaccaaccggccatcgcgttcatgatcgccaaagaggccagcaaaacaggctacggcgaagatgagcagctgggagtgaacgccggattcaccgagaaggacgtggtgaaccagatcgctaacgccgcgctgttcagaaagtcatataaccgcgtccagcacgtcgtcgtcatcaagtcgaacaatgcggcagcggctggcaactttgatggccgctacttcgtgaagatcatgtgcaatcgcctgtatgtcaccatggggagcctggctaactatcttgcgggggcggaatagtgagcggggcaaagccgggggttatcggctgtcggaagatgatcaaaggcagcgagcgcgggaagatggtcggctgtgggacatacttccacgctggcgggcgcagcggacgctggcacgtgatcgataatgtcgtggtgtgtaaacgttgtttcaaagagtggaaaaaggagcacaaagatgaagaaagcgatatttctgtttaaccgctcgcggcacatgttgcagccgtggttagacgctggctatgagtgctggacatttgacgggcagcttcctgacggtgttcacgaggttgagccgggattgatggcggttggcatgtggttcgacgcctcagctaccagcgtgcatgccagcgacgtagccaggatcgtaggtggtggcgtgaagttcatcgcctctttcgcggaatgcacatatctgaccactaccggcgcgcgctggctgtatcacccggaagatcgcgatcttccagttgctgagcgccgaccacacccggcataccccaaccgccgccgggatatggaggacgctgtgaagctggcgaaattcgttgagctggtggaggcatattgccacatcgtcaacggtgatttttccaccggcccgatcccgtggatgctggagaatccggctcgatcattcctgccgaagctgtggcgcaacttcaatcacaccttcaacccgtgtgactatggcggctatatcccggagggtgaagagatgcacccggactaccctggtgtcattcctgaccgtgacgcctacaccaagctgaccgggatctggtgcagtgaagcgttcgtgatgcccaagccgaagccggttgagccagtaggcaaggatttcaaccgggcgataaaggtcggcggaaagagcacccgcaccaagaacatccgcagcgccactccgcgaggcttcgcgctggctgtattcgaggcaaaccaccgtgcataagttcattatgacactggaagattaccggatgtttgccactcgtgaagaacaccgcgtgatcagcgttgaagagccgccgattggcgatgcctgcatatcgtgtgagggccgccttgatattcacgtacaggtgatctcctgtcgtgaatggacgttaggcggtcagctgttttatgtgagcaaaatcaaatatcggtcaaataccccaaaggaaacgaaatgaaagacgaagcagacaaagtggctatcgacgcgttcgaagcagaccacaacccggcgctgcacgcggaagccgcagcaaagggaattacgccgtggcagctgttcagtaatcgcgtatgggctacgaaggggctggtgactggcgggcactaccaggcagttcgcccgcagaaagtgaccggccgccggttcaacgggagcaagaccccggataacgtccgcccaaactggcgcacccctgagcacgtgttcgcgtggctggatatgacctacggcccgtttgaggtagaccttgcggcctgcgagaagtcgacgaaatgcgacttctacttttgcaaggaagagaacagccttgcgcaagactggagccagtttgatgcgatgtttctgaacccgccttatgacgacatcacgccgtggacggagaagagccgcgagatcaagccgggcgcagtgctggcggtggtgctgccgaacgacaacagcacagtgtggttccgcaacatggtggatcaggcctacaccatcatcaacatcgtcagcaacggcaagaactctggccgcctgtcgttcgaacacgctggcaccgggaagccaggcaagcagaacaacaaaggcaccgtgctgttcattctgcgcgggcgtaagcgtcgcgccggtgtggagacgctctacatcgatcaggatcaaatgctgcgcgaactggggttactggatgcacagtaaggcgcaggtctggcaggccgcgaaggagtgcggcctcgacgaattcattaccgccgtttcaaaagcgtttcccggcgcgattgacggcgtagcgatatctgcgaaagggatcggtgttctggcgactgacgaccgcatgctgcgcaggctggtgagggttaaaccgggcgtgacgctcacaaagcaacaggtcaaggagataaggacgaaatctggtgttactatgcgatataagggggaaaattgaggagtagcaccgatgggtaagacgtaccagcggcataaggcccgcactgtatcacgggctgacaggctgcgcaggatgaaccaagataagaacacgcgagtcatcaccaaatacatcgccgggacactagccaggctaccagaaggagaagatcatgacgttagcacaggcaatcttgaaggcatcaaccgaagggcgagatcttaaagtaggaaagggcgtagatcgtgagaacaagcacataggcccgcggaacggtaagttctggactgacgaacgcattcaggaagtgaccgacgacgtcaccgttcggcggatgacgaaggagcagatcatggagaagcacaacatcactgaaagcggtttttacaacgcctgctaccgttttgggatcccgacgaaaaaatgaaaaaacataccgttattcatatcgacacggctgaatttcataacgccgtctacatccttggtcgtgaagagaagatctataactggaatcagaacgtcgagttccgcaagcgccttgtgggcttactgggtgagattgcagcagcgaagcacctgaacaacattcacggccgccaccggatcatcatcccgatgggagtcaacgcgcgcactggcgtatcggttaatgcgttcggccagggtgacatcatgaccatctcacgcacagggaagcgcgaacggcaaacgcacgtctatgaggtgaaatccaccgagggcatcggcaagcagttgccaaccatccggcaggacaacgctgaaagctacgtgatgaacggcgttgatgcaatcattctggtggcggtgcatatcaacaaggcgaaggcagagtgccggatcatgcagcaggtatcgcctgttgaagtgatcgagaagtggaggccgatggttaaccggtacggtcaggagtgttatgctttcaactaaatagactttgagattatcatggcccccgttaacactcacgggggcttttcttttgggcgacttcttccacggcatcaccgacatctatcggatgtataagaccgacttagattaccccatcgctgcggccgtcatggctacattgcgtcacatccagctcggtcatgaaaggcgacagatctggactaatgcgatcatggcggcaatgttcgcgaagggcatcacctttatcatcaacatcatcggggattccgttccgcgaatgcactggatcgcaaaccaggatgcaggctggatcgttgcctgcgtgcttgggtacgttgggatcgacaaggtcattcgcgtggttgagcggtatttcccgtcaatgaatctcaggggaaaaaatgatcggcaaccttaaaatttacctgctggcggcacttgccgcctttttgctatggcagggcggcagctatgcactgagcaggtacggcgaaagccgttatgaaagcggcgttacagctgggattaacaaggaggctgaacgcaggaacaaaattgaccgtgatctggccgaaatgcgccagagggagaaagaccaagatgatcgcgacacgactcgccggattgaccaagcacgcgctgacgctgctagtgctgcttatgctgctgacaggctgcgccagcaactcaacgcagccactgccatcgcaaaacaacgcgcctccgctgtcggcgttagcagtgatgccggaacgctcgccgatctgctcgccgagctgttctatcagtcagtgcaagcgggtaacgaactggcagcagaagctgatcgatactacatcgccgggcagcgctgcaacacccagtacaaccgactattgcaagcaacaaggagtaacaaatgaagatgagtgacaacgggctgcaatttacagcagcatgggaggaattccgcagcgctccttacttcgccaccgaagacgagcgccgtcgcgggatctacacctggggcttcgggcacactggccgcaaccctccacgcatcaacatcacgcgagaagccgcgctggcgatcctgcgtgaagacgtagcctatgctgagaagaaggtgaacgagtgggcacataagtccatcacgcaacccatcttcgacgcgctggttgatctggtcatcaatgccggtgaagagccaatcaagccggacaagaaggcgggagacttcgacgacctggtgacacaaggtcgctgggatgagctgatcgtacagctggagttcttccgcaaacagaacgggaagatcatccctgggctggttcgtcgggcactggcgcggcaggcgctggcgaaggggatgaactggcgggatgctgaggccgttggccggaacgcgaaggtgtaaaaaaacagggggccatttggccccttgttatttattgcagcaaaaagaaacttaacatcacatacccaggcgcatattctccgacgtcgcagcagtgcgtgatcatggcgtcaaccactcttccggtgtaaccatctttctcagtccattcgcggaggttgagcgtatcgcctacagcaaagtgacgatcagccttgcgtaattccgcgcgcttcttcccgcacttaacagcgtggaagtgaaccgggaggattttaagatcgtggatcacttcatccctcccacgacctcagcgccgatagccgcgtacccagcgaggtcttcgaacgagtcggtgttgtcgtcagtctgagcgcggcagatctttaaaatggattgtagcgtcaccacgtccaggccagtcagcggcatgttctggcggttcgcagacgaacgcacgatattgaatgcgtcagctacgcggtcgaactggcgctctttgccgttatccgcgccgtagcggcgaccgcgctcctcaaggtggccctttaccttctcaagaacctgggcggcgtcaagaggctcagaggagattttatgggcatcggccttttcggcgaccatgtagatcgcggttccatccgtgcgagcacagtcgcggttcagtgtcgcgatgttgtcgtgagttagcgccgactcatcagctacgccgtggtggtggaagaagttggtcgggaattcgatcacgttagggatagaatattcaccgtgatctaccaggcaatgccagcgggcgatgattgtttcctgcccggaaagctcaccgtaggagatgaacgtcaccagcgagttgcggcccgggatgttgctaccgcgcagcgggctgccgccttcgctgatctcataggtgaagcgcagaatgtccccggcagtgaagcggtcggtaacgtcagttgtttttttcttcttggtggtcatgttcatttcctcagcattgcattagtgttttgcgccagtcggcgctttcgagatcgacgtagcctagcagaacaggcaccccttctgaactccaaaattcagaacggtgattcacgaacggctctatgtcgtaggcgtatagcgcgccatccatatccaccgccacccaattcgcccagcgcggcacggttatgaccatgccgttatagttgaataccttaaacagcccgttagtgatcagcttcataatcatccccaaagcacggaacgcgcgggtaggtcactggtgcataggcctcgatcctgaaatcgcggttacggtcgagcggctggtagaatgaactgaactccgggtgaatgccttcctggcaccagccgacgaagaagaacggttcgccgccttcatcggtgcggccgtcccagcacgccagctgttcatcggtgtacccgcattcgtcgaaattaacgtaccagaagcggcggatcaggcggcagttgttacgcagacgcaccaccacccaaaactccatttcatgcccgtgctcaatgtccggggtgtcgcccaaagaccagactgacggcaagaattgttcgaatactggctctttctgtttcatttgcaaaaatcctctacgttgatgaagtcgggggtcatgaccatgtttccagaccgtaggaagctcaggccgaagcggtggatcagggtgctgcactggtcgatgtcgctgtagtgcatgcgacgccagaatcctttcagtgtccagacgtcgtcccagcgcacttgcgggcggtcgatgaactcagcgcggacgaaccggccatattgccaaacccattgcccgggcttcacgtcggcgacctccacgagcttagtggggaataccgggatcttgctcatcgtgctttcacctcgccgtagtagccaacgtccatcaggtctgatacgaccgcgatgacctgagccttcgcctcatcatctgccttgttgttggcaatggccttcatcactgcgctacgggtgacgtcgaacatcggttcggacacgttacccttacggtagcgctcacccagcttgcaggcgtccttcatgaccttatccatctgcgcgttatccggcaggcggtcgtatacaccaaggtcgcgctggatattgatgttcttgatgcctacagcgcagctaacggcgctggcgtccccgacgtatgagcagcccagcacggcggcggcggcgatggcgatggcggtgatgcgtttcatcggttactccttgtttccacggatggcggcgatggtttcaatgtggcggcgctcttctatgcggcggcgctcttcttcggcggcgatgttgcgcatcaccagcaggaacaggatcgccagcagcggagatatcagcagcgccagcagcgaccaacccaggccactgcgtccgcgacgatcggcagcgatacccaccagcacagccatgacacaccaaataattaacacactcatgattctctctcctgttagtcccggcaccctgccgggatctgcatattagtacgtaataataaccagtgtcaacactatagaataattccagcgccgtgcgtgtaaacggtggcgatcgtcatcagctcaaggcgtagcgacttcaacgccccggcggcggtctttgcgtcgatctcggtgacgtggttctttgagtcggtataagacgccttaaagcggttgtgcccgtaggcgatgcagcgcacgcgcccgaactcgacgacgacgcggtaggtcgtctccttcgtgttctcgttgacggcttccagcacggcgaactgcgccccagtcatgagcattgcgcagatatgcgcgcccagctcgcgggcttcttcacggtcggtgatcttctttagctggtcaatcattgcgggcctcctcgcggcctgcgggcgtgatctcgcacgccccggtagttatgttccactttgccagcccacggctgacaagtccgttcagcgcggtgacggtatgtgacttgctgtcatagacccagtcgcctgcgcgccattctgagacagccagccgctttaatacggcccgctgtctgatacgcagcttcactccgggcgacccccggcagccagccatgcagcgtaagcgatggagcgggtcagatcgcacttcatggtgatcttgcggtcttcatcggcgttgacccactgcgagaacgtcagattcagaggcataggctcaccctcagcggctgcgagcgcgtggtgatagctgttcagcgacagcagaagggagacgcgctgccgggcagtcatttcacgcatgatcgcccgcacgcacatggaggcgctccccgccccttcatgcttgcgctgtcggccatcccaaaacttgaacgtcattgacagcggtggtcttttacgtccgtacataatttcctcctgttatgaaatatattcgactgtttcaggaatgatcgccgcatatttgcagcgttttagcgctggtatgtaccagaaagaaaacatccgttcttcgcctgagctgtcgtcaatgtcaacgtgacacaaagacgcctcatagacgatcccactggcagcggtgacgcgaactcttgggtagacgatccccttccatgcgccatcaatgcccttcatgaacttgttggcggcttcgtctgcgcgaatgaacgacggttggtcgtggtaagggaagaaagcgacctcagcgccattaacgacgacggtgacgcatttactcataggctcctccggttgtggcccccgaaggggccggttgtttcagcagatatggtcaacaatatttatcagaaaggcagctcgctatcgatccccgtcacccgcgggcgggccatcatctcaaggtattccttttgggcctgctcctgcgccagttttgcgagacggcgaacgctaaccatcatcttgacgatgaagcgggccgggtaacggtcgatggcaagcagatcctggcgaacgcggtcaacggcacgctgtacgccgatgtgcatcaggtagccgttgtgggtgtagtggcgggcaatctgaacagcgcggtcaatgatgccattaacttccagcgcttcggcgtgtgcttcctggcgggctgcgtaggcgcgctggccttcaacggcgtccagcagtttagccagcagcgctttcacgtcgcacagactggcgttagctttccactctgcctggttccagtcgtctaggttagcggagatgtaaccttctacagcctgctgcatatcgtcgtacatcgtatcgtcaagggtgtcgacgttttcgcagatcagcgcgttcgctgcggagtcgatgatcaggcaggccagcaggtcggcgttcttgaactggccgcgggcttgctcgttggtcatccagcttgccggattgccgatggtcagatccagtgcggcgagaatttcgttagcggcggtaagatatttgatagctgacttagacattttgcgaccccttgttatttatcggttagttactgcctgttcgataaatatattataggggccgcatcatgtcaatagtgcttacactactccttaatgaattctttgaaatctgcggacgatgtctcgcgccaggtcatcagcctgccgttaatgatcgcgtgacgttcgcagttgtaatcgtccctgaatttcagaatggtcatggtgttcaggccggtcttggtggtcagcttgcgcatgctgcccgctttagcgagaagtgcggggatgcttgtaacgtggcaaatcaggctcatgttgttttcctcagtggttatcacggcagctacccataagcgggggaacggcatctttgatcgtgtagtaagggttccgggcttcgtgtgggttagactctttgctcaggtgtcccagctcagccattttgtaaattgcgtcgcgcactgactcccgtgaatacggcgtcccgtcagccttaaacaccgtggagctgatacggtgcaggatctccttgtatggcgcggttccgtgcggctccgccctcagcagagaatacacggcttcctgcaatggcgtgtacacgtgcgcctgacgcttctcctccggctcaaagtgctcctcatccgttccggcgtccatatcgtaaacgcggtcttcgaacagccagaccttcgtcgcgtcgtcgatgtagatgaagtctggccgatcgacctcctgccctggggcaagtttcttctcatacgtgctttttttcttcgcctcaacgtccttcgcgaacaccggcacctgaaagcctttgagcttaaagcgccccttcaaaccaccctgtcggctcttcccgacgttcaggacagtgtagcctgtctccttctggcgggcgttcaatcccttaccggtctgtgtcttctcgcgcaccaggctgaacgttttatacaccgcgcccttcgctgcggatccgccacgagactcaagatcatactggccggacatcaggcttcccttgctgacgtgcgggatgaagatcccggcgcagttgagtgactcagcgaaccggtgcccggcagtggtgatcagctgctggtcggtgttgctgttttcgtccatgctcacgccgttattgttggccgccgccaggtggaacattttgctgtcgaagatgaccagattcaccggcctgccgttggcgaactgcaaaacgcgactcttctgaatgcgcaactttcctggctccatcaggtcggctggtcgcttgaacaccttgatccagtcacggagattgacgccggtgcgcagcgaccaggcggccacctgcaactcaacgctgtccgggtcttcggtaaagaacacactcacgccgggattgcacacgcggaagcagttgaacagcggccgacccatagcgaggctgacggccatttgcacaagcagcgtcgtcttgcctgcgcctgcgtcaccgttgatctcgttgatggtgcggcggttcagcaggccttcgatcaccgggtcgtagaagtccggcgaggtgttcagcacatactcgccagggtcgtaatctttcagcgcgggatcttccaccaacccctgctcaacctcttcggcgagacgctttgccacctcgacgcgctgggcggataagtccattccgaggttctgcttttcattctcctcgcgaacgatgcgttgcagctcaaggtggcgctgaccggcgtctttcttcttcggcttaggtggttcaggtggaacaggtggcgatacttcttccgcctgttcacgctcctccacctcagcacgtgctacctggtcgaagtaagcctgcatgtcggccatttcctgcgaataggcttcgtcctcttcctcgcgggtcattggttggttgagaatgtccgccgcttcgtgctgtttctcctgatcgcccagtaacgccttccagtcgtcgggcgtcatcggccttttgttctcttcgttcatcgtttcctcctgctttggttcggacattattcacggcaggtaataccgtgtcaatatcaattactttccgcctgaaaaacaggccaaaacctgtaaaccaatactatttatagactgtaaataccagctattggaattttcatcacgcctttagttttcaatggcttacagagtacgttttttgagcagatgtaaaccagcgagactcaagcggagctactcgccacctcaacgccacctgaacatcaggcggacttcgcaagttattgataacaaaggactacctgaaattttcaggaggaaaatggtcatactaccgaacttttaagtgtctgatattgaagggttaatttcaggtgttaggtggtatccctattatatataaaacccatataattacagaaacacgtacacccttacgcac

SEQ ID NO: 53 - DNA, 40418 bp, unidentified
  source 1..40418: mol_type = genomic DNA
atgaacgcattaaacattgcacgtaatgacttctcagagattgaactagccgctattccgtacaacatcctcagcgagcactacggggacaagctggcacgtgagcagctggcacttgagcatgaagcgtacgagctgggcgagcagcgtttcctgaagatgttggaacgtcaggtgaaagctggtgagttcgccgacaacgtggccgctaagccgctggtcttaacgttgcacccgcagctgaccaagcgcattgacgattggaaggaggaacaagcaaacgctcgtggtaagaagcctcgtgcatactacccgattaagcacggtgtggcttctgagttagctgttagcatgggcgctgaggtgctcaaagagaagcgcggagtgtccagtgaggcaaccgcactgctaaccatcaaggtcgtcttagggacgctcacagacgcctcaaaggccacaatccagcaggtgtcctcacagttaggcaaggcccttgaggatgaggcccgcttcggtcgtatccgtgagcaggaagccgcatacttcaagaagaacgtagcggaccagctggacaagcgagtaggccacgtgtacaagaaggctttcatgcaggtcgtcgaggccgatatgatatccaaagggatgctgggcggcgacaactgggcgagctggaaaactgacgagcagatgcacgtagggaccaagctgctggagctactcattgaggggactggtctggtggaaatgaccaagaacaagatggcagatggctccgatgatgtgaccagtatgcagatggtccagctggctccggccttcgtggaactcctgagcaaacgcgcgggagcactcgcaggtatcagcccgatgcaccagccgtgcgtagtccctccgaaaccttgggttgaaaccgtaggaggtggctactggtcagttggtcgccgcccgctggcactggtgcgcacccactccaagaaggcactgcgccgctacgcagacgtacacatgcccgaggtatacaaagcggtaaacctcgcgcaaaacacgccgtggaaggtgaacaagaaggtactggcggtagtcaacgagattgtcaactggaagcactgcccggttgctgacgtcccggcgattgaacgcgaagagttaccaccacgaccggacgatatcgacaccaacgaggtggcacgtaaggcatggcgcaaggaggccgcagctgtctaccgtaaggacaaggcccgccagtctcgccgtttgtcaatggagttcatggtcgcacaggccaacaagttcgctaaccacaaggccatctggttcccgtacaacatggactggcgcggacgtgtgtacgctgtgagcatgtttaacccgcagggtaacgacatgaccaagggtatgctgacactggccaaaggtaagccaatcggtctcgatgggttctactggctgaagattcatggtgcaaactgtgcaggcgtcgacaaggttcccttccctgagcgcatcaagttcatcgaagagaacgagggtaacattctggcgagcgcagctgacccgctgaataacacttggtggacacagcaggattctccgttctgcttcttagcattctgctttgagtacgcaggcgttaaacatcatggcctgaattacaactgctctctgccgctggcgttcgatgggtcctgctctgggattcagcacttcagcgctatgctacgcgattctatcggtggtcgtgctgttaacctactaccttctgataccgtgcaggatatctacaagattgtggccgacaaggttaacgaggtgctccatcaacacgtcgtcaacgggtctcaaacggtggtcgagcaaatttccgataaggagactggcgagttccgcgagaaggtaacgctgggtgagtccgtactggctgctcagtggttgcagtatggtgttacccgcaaggtaactaagcgttcggtcatgacgctggcatacggctccaaagagtttggcttccgccagcaagttcttgatgacaccattcagcccgctattgacaacggcgagggcttgatgtttacgcaccctaaccaagcagctggctacatggctaagctgatttgggacgctgtgaccgtgaccgtagtggccgctgtcgaggcaatgaactggctgaagtctgccgctaagctgctggctgctgaagtcaaggacaagaagaccaaagaggtgctgcgtaagcgctgcgcaatccactgggtaacacccgatggcttcccggtgtggcaggaataccacaagcgcgaccaagcgcgcctgaagctaacgttcttaggtcaggccaacgtgttcatgacgtacaacaaaggggaagccaaagagattgacgcacataagcaggagtcaggaatcgcccctaactttgtgcactcacaggatggtagtcacctgcgcatgaccgtagtgcacgccaacgaggtctacgggattgactccttcgcactcattcacgactccttcgggaccattccggcagacgctgggaatctctttaaggcagtccgtgagacgatggtaaagacctacgaggacaacgatgtaatcgctgacttttacgaccagttcgctgaccaactgcatgagtctcaactggacaaaatgcctgcggtcccggccaaaggtgacctgaatctgcgcgatatcttagagtctgacttcgcgttcgcctaaggtctcaggcaattaggtagcactatagggaaccttcgaatgaccgagggttccattacttaaagtcttaacttaaagaatacttaaagaggcacgctatgacttactcaatcgtcgtaaccatcttgttaatcatcatcacaacactcctcattgtgagtctacgtaatgcaatacgtacagaagaacggttggaacgtaaggcgcgagaggccaactcccagtttagtagcgagtcagccaaggtccttcgactggtggacagggttgattccctgagtagacaggttcgctacttagaaggcgagcttgagagtgagaaacagaaggtgcgcgacgtgaacgaactgcgtagccgccagcgtgaccgcatgaagtttctacgcaagtcactagatgagacacaaaacgagctgctgatggtctccgacctgattcacattaagttcaccgcattattacctgacggacagccagtaaagacgctctttaagttaggacttgggccgtgtggcctgcacgttaagtccctccgctggacagagctgggtgaccgctacctgatagaccagctgtgtaccaatggcgagcgtaagcagttcgtctactacaagagcgaagtagtaggacgcatcgagttccgccacggtaagtctgaataaggtagcactataggaacatactcaaggtcatcacgttcggtggccttcatgaatgtcccttactagcacaatcaggagtaacaccatgacacgtcaagaagccaaagtaatcaccttcgcacttcgttattcaggcgcaatgcaggacgaggtagtcaacttcgagcgcaaccgtgaacgtcagcagaccgagggttacatccctaagggccgcaagctgaacaagacaaggcgtggtggcggcgtgaagggttccttccgtaacgcgaagggtgacagcgttgttaaccaagagaaatacttcgtaggagcgtaaccaatggctactgaaaaaagatggcttttcgatgggagcacctcacaatggtctcgtttaggagcagcggagcgtaggctactggatacgacaggcctgcacgtggtcatgcttgacgacccattcactaacaccgtgctgttcaacgtgttcgagccacgcgggtcgcttctaataagtaagcggttcagccactggtcgattgactcagcgtcagactggctggcaaaactcacagctgactactcaagttggaaatgattaggtagcactataggcagactcaaggtcatcggatttcggtggcctttatgattgcttattgcacactaaatgaacactacacttcggagacatcatcatgatgaacattaagactaatccatataaggccgtatcgttcgttcgctctgctatcgagaaggcgctggagacttccggctacctcatcgcagacactaagcacgatggtgtacgcgggaacatttgcgtagacaacacggccaacgcagcgtggctcagccgggtctccaagaccattccggcccttgagcatctcagcggtttcgaccagcgctggcagaagttactgaaggacgaccgttggattttccctgatggctttatgcttgatggcgaactcatggtcaaaggcgttgacttcaacaccgggtctggcctgctgcgtaccaagtggctcaagaaatacaacatggagtaccacaacgttccagtaacaccagacatgctgaagcctcgcaaggttggcgttgctaagcgtgttcgtaccgagtttagactatctgccgcgcacctcaaagttatcctctacgatatcattccgcttgacattatcgagtccggtgatgattacaacgtgatgaccctcctccgccttgagcacgtcaaggttgccttaccagttctgcaagaccacttccctgaagtcgagtggtgcctctcggagtcccatgaagtttacgacatggacgaactcgatgcgctgtaccgacagaaacgcgaagaaggtcacgaaggtctggtggtaaaggaccctcgcggtatctacaagcgcggcaagaagtccggctggtggaaactgaagccagagaatgaggctgacggtgtagttgtgggactcaactggggaactcccggtcttgccaacgagggcaaggtgattggcttcgaggttctccttgagtctggtcgagtggtctccgctaacaacatctctcaggcacttatggaggagttcaccgccaaggtgttggatgctttcacagaggatgaaacgaagaacccgttcgagggctgggcgtgccaaatcaagtacatggaggaaactccagatggctccctgcgtcacccgtcgttcgacaaatggcgtggaacagaggaagaccctaccgttaaggtgtaattaggtagcactataggagacaacaacatgtccatcaatctgattctaatcatcgtgttcatcctcgcggctatcgtgtggtcaatgaatgacgagccacctaaaggagcataacaatgcgcttacacttcaataaatccaacggtatcttctcggttcgccgggaggaccgcagcactgtagcagcctccgagcgccacggtaagattccacgcatcggcgacaccttcgagctggcacctagtgtgcacatcttggttactcgcggtctctacgaattggctcagactaagagccgtcctttcgtacccgttgtggtaaccaagtggccacgccttcgcctgttctgggagcgcatcaaggaggtggtcaatgactgaacgtgaaattcaagtggtgaacctgctggtggcccacaacgctgaccgcccagattccacgaaatgcgctgatggtgtggtgtgtgccagcgtacgttgcagcgagtgtccactcaacgcaaaaggtacaaccattggggaagttcgtgcaatgaaggacagcaaggctccgagtgtagaagaagacgatggtgttaagcaaccaagtcactaccagctgttcggaggcatcgaggccattgaggtgattgctcgcagtatgactcaggagatgttcaaggggtactgcctcgggaacatcctcaagtaccgactgcgggccgggaagaagtccgagctggctactttagagaaagacatggcgaaagctgctttctatctggaactatacgagaaacacaaggggttgtgtcatgcttgagttaacaccgagtcgtattgaaatcctgaagtattgggcgaaggacttcctcagaatctaccagactgaggacttcaccaaggaggagcttgagttcattgaggagattcttagcgatgaacccgagtgactggtgccgagcgatgtacgagaagacgctcgaccatgcgtacatcaccctgtataacatgtggaaggagcgagaagatgcaaaagttcgtcgtaacggtcgagacagctaacgcatcgtatgaactcccggtacacgctgggtctcttgaggaggccctagaagttgccgaggcggagtacgaagagttaggccaagtgactcgggtacgcccagatagtcattaggtagcactatagggacacatgctgtccatcttacctattattgaggagattattatgtcactcactgagattatacgcacagcgtttgtggacaatacctgccgtaacttcatgttcttgcagatacagaaacacacagggtgctctagacactgcgctaaggccctgacgtttgcgttcatctaccacgctactgaagaataccttcagaaaatctttgaagaaaacaaataggagattcatcatggcattcgctaagaagaagatttataccaccaagattggtacctgtgagccgtatgcttacttcaacaagccggactatggcggtgagggttttgagaacccacgcggtacctacaagggttccgtaacgttcaagaacgaagactgtcaggagctggtagacctcatcgttaagacccatgaggaaaactacgcggcccgtctggaagcgcacgaagcgaacccgccgaaggttcagaagggtaagaaacctctgaagccgtacgaaggcgacatgccgttcttcgacaacggtgacggtaccaccacgttcaacttcaagtgctacggttcgtacgaggacaagaagactggcgagaccaagaagattgttctgggcgtagtagacgcgaagggtaagcgcatccaagacgttccgattatcggcggcgggtccaaagtgaagattcgcttctcgctggtaccgtacggctggtctgcggtagctggcgcttccgttaagttgcagctggaaggcgtgatgctggtcgaactggctacctttggtggtggagaagacgactgggctgacgaagccgtagaaggcggttacgaagctgacgaacctcgcagccgtaaacctcaggaagacccggaagactggtctggtgaggaagctgacgagggcgaagccgaagaagacgatgacttctaatgtcgggctatggggccaaagggattcggaaggtgggtgccttccggtctggccttgaggacaaggtgtccaagcagttagaatcaaagggcgtcacgttcgactacgaattgtggcgcatcccttacgttattcctgcgagtgaccacctttacactccagacttcttgctgcctaacggcatcttcgtggagactaagggtctctgggaagccgaggaccgcaagaagcacctattgattcgcgagcaatacccggagttagacatccggttagtgttctcttcgagtcgcactaagatttacaaagggtcgcccaccagttacgctgagtggtgcgagaagcataacatcttgtttgccgacaaattgattcccgtagactggctgaaggagccgaagcgtgaagtaccgttcggcaagttcaagcagaagaaaggagcaaagtaagtatggccaaggttcaattcactaagcgacaggagacctctcagattttcgttcactgttccgccaccaaggcaaccatggacgtaggtgttcgtgagattcgtcagtggcacaaagagcagggctggctggatgtaggttatcacttcatcatccgtcgtgacggtaccgtagaggctggtcgtgaccaagatgctgttggttcacacgtcaagggatacaactcgacttctgtaggtgtgtgtctggtaggcggtatcgacgccaagggtaaccctgaagcaaacttcacacctcagcagatgagcgcactgaaggggttactgcacgagctgaaggggacctaccccaaggctgtcattatggcgcaccacgatgtagctccgaaggcttgtccgagcttcgaccttcaacgttgggtaaagactggtgaactggtcacttctgaccgtgggtaaacattaggtagcactacagggagacaattacgtttccctgttgtcgcttgaggagattactttatgagcaaagaccatattatagatatcatcgttctcgttgtggccactgcgtccgcgatggtgcttggtgccaccattatgtactcctaccttaactgaggtgacttatggaaaacttaaagcaacatttagtagatacgtggccactatacgtgtacgcatcggcattagtcatcggcgcacttcgagtgtggctgccatgagttacggtgactctcaagaagacggtcaggaaagtatcttcctgttccacgctccgtgcgaaaactgtggttcttctgatggtaactcagtgtactctgacgggcacgagtattgcttcgtgtgtcaacaccgggttcccggctcagaggaacgtaccgaaaagttatcatcgagaagacccaaaggagggaattacgggatgagtacacaaggttcaggcttattggtattcggcgagagtgacggtcggtacactgacctgacggctcgtggtatctcaaaggcgacatgccagaaggctggctactgggtcgccaaggtcagagggactgcctatcaggtggctgactatcgtgaccagaatggctccatcgtctctcagaagttgagggacaaggagaagaacttctctacccgagggtcccacaaaggggatgcactgttcggtaagcacctatggaatggcggcaagaagattgtcatcaccgagggtgaaatcgacatgctgaccgtgatgcagcttcaggactgtaagtggcctgtggtttctctcggtcacggtgcgtcagccgctaagaaaacttgtagtgcaaactacgagtatttcgatagcttcgaccagattatcctgatgttcgacatggatgaccccggtcgggcagctgttgaggaggccgctcaggttctccctcccggtaaggtccacgtggccgtgttaaccgagaaggacgccaacgagtgcttactcaaaggcaagggcaaggaagttctcgaccagatatggaacgcagcaccttgggtaccagatggtgtcatcggtgcgatgtccatgaaggaccgagtgcgtgaggtcatgaccagcgaacaaagcgtcggataccttttctcgggatgtccgggactgaatgaccgaaccttgggtgcacgtggtggcgaagtcatcatggtcacttctgggtcaggaatgggtaagtctacgttcgttcgccagcaggccctagggttcgccagagggcaaggacttcgagttggtatggcgatgcttgaggagtccgtagaggagaccatggaggatgtcctagggattgctaacggcatccgcttacggcagcagcctcgggagttcaagcagaaactcattgaggacggtacgtacgatgagtggttcgatgcgctgtatggctcagaccagttccatctctacgactcctttgcggaagctgaggtagaccgcctgctggccaagctgcactacatgcgcacagggttgaactgtgacgtaatcattctggaccacatctcaatcgtagtgtcagcctcggaggaatccgatgagcgcaagatgattgaccgtctcatgaccaagctgaaagggttcgctaagtcaaccggagtggtacttattgttatttgccacctgaagaacccggagaaaggtaaagctcatgaagaaggacgtgctgtttccattactgacctgcgtgggtctgggtctctgcgccaactctctgatactatcattgcccttgagcgtaatcagcaaggggacatgcctaatcttgtcctccttcgtattctcaagtgtcgctttaatggtattggcgttggcattgcggggtacatggagtacaacgaaaagaccggactccttgaaccgtctagctacactggcggagaaggagagggagatactggctgggaaggccacgaagaagacgactactagtcatgacgagtggtgctcctgtgagcactgctgtccaacactcgaagcattccgcatgagaatgtacagagactttaaccataaataggagaatcaacatgtttaaactcatcgaaactttaggccgtctggtcatcgcgctgtacatccgtgaagccaaggcactggacaaagcgtcaaaggttgaagcagaagcagccgctaagctggctaaagccgccgacaaggcgcgtcaggcatctctggatgcaaccgcagaggcagcgaaagttgcacttaaagctcagaaacttaaggagttcttctaatgactaccaaagttaaattccccggcaacaccatccagctgtccgacactgtagaccagtggggtcgcaaggttcacatcaacgtccgcaacgacaaggtgactctggtctaccgttggaaggctaagagtgataaccgtgcgcacactcagcgtgtgaccctcgacgacacacaggcggctcgactgcttgcgtccgtagctgtagccgctactgtggccatcggtgaggacaaagtgcgtgaggcaatcctgagcaaagaggttggcgaaacgtccgtacgtctggccgaagcgtcagaagttaagtgataaactcaaggtcattactatatgtagtggcctttatgattatcacacacaacatattgagaggacataaccatgcgtaaacctgaagaaatccgtgcagacatcgagaagctgaccaaagagctggaagctgttaagattcacgagtccagacaggttgctgctgttaacatcttgtataacttagggtggacacacgaccctcacaagggctggcagaaacctgcgccaaaatggagcgactacaaggccccactgaaggctggcgagctggcaacatgggaggatggtgcccttggtggaaccgtgtatatccgtagtgttggcaacaagttctcacaggtgtctcacgtccgtggcgttagtcgccttggtgctgacgtccttacaggcagcttcgcaattgagaacagtaagttgacaatccgtcctcgtgagtatttcatcgggcgtcgttaagtaacaggagaccactatgttagtaaccgatatcgaggctaacaacctcttagagaaagtcactcagttccactgtggtgtcatctatgactacagcacggacgagtacgtatcgtatcgaccttgggacttctcagcgtatctcgatgcgttggaagctgaggtggctcgtggtggtctcatcgtattccacaacggtcacaagtacgatgccccagtgttgaccaagctggccaagctccagttaaaccgagagttccacctgccgcgtgagaacgtagtggacacgttggtacttagccgtttgctttttgcgaacattaaggactccgacatggccctgctgcgttccggtaagttacccggtaagcgcttcgggtctcacgctctggaggcgtggggttaccgcttaggcgagatgaagggtgagtacaaggacgacttcaagaagctccttgaggaacagggagaggactatgtggacggtgctgagtggattagcttcaacgagccgatgatggcctataacgttcaggacgttgtggtgactaaggcgctcttagagaagctgctgagcgacaggcactacttcccggatggtgatatccactggtgggcacacgatgccgtgtcgttctggagcaactcatgcgaggccgtatggctggaacaccgagccgcttggttactcgctaagcaggagcgcaacgggttcccgttcaacaccaaggccattgaggaactctacgtcgaactcgctggtcgtcgttctgaactccttcagacactcaccgacactttcggaacttggtatcaacctaagggaggcactgagttgttcctgcaccctcgcaccgggaagcctcttggtaaatacccgcgagtgaagtacccgaagcagggtggcatctacaagaaacccaagaacaaagctcaacgtgagggccgtgaaccctgcgagctggacacgcgggattacgtagagggcgctccatatacaccagtagagcacgttgtgttcaaccctagtagccgagaccacattgcgctaaagctgaaggaagccggatgggtaccgacagagttcaccgaaaagggtgcacctaaggtggacgacgaggtccttgagcatgtgcgtgtggaagaccctgagaagcagcgctgtatcgacctcatcaaagagtacctgatgatacagaagcgtatcggtcaggcggctgagggagacaaagcgtggctacgttacgttcaagaggatggtaaaattcatggttcagtcaatcctaatggtgccgttacgggccgggccactcacagcttcccgaacctcggacaagtgccgggtgttcgaagtccttacggcgagccttgcagggctgcttttggtgctgagcatcatcttgacggcctcactggtttaccttgggtacaagctggtatcgacgccagtggtctggagttgcggtgtctcgctcacttcatgtccaagtacgacgggggagcttatgcagatgttattcttaacggggacatccacacagtaaaccaacaggctgctgagttgccaacacgtgataacgccaagacattcatctacggtttcctctatggtgctggagacgaaaagattggacagattgtgggagcaggtaaggaacgcggaaaggaactcaagaagaaattccttgagaacaccccagcaatcgcagcgttgcgtgaaggaatccagcagaccctcgtcgagtcatcccgatgggtcgccggagagcagaaagtcaagtggaaacgacgctggattaagggactggatggaagaaaggtacacgttcggtcaccacatgccgcgctcaacacgttgcttcagtcagcgggtgcgctcatttgtaagctgtggattgtcgagactgaagagttacttctcaaggctggcttgaagcacggctgggatggcgactttgcgtacatggcgtgggtgcatgatgagattcaagtagcctgccggaccccagagattgcacagcaggtgattgacattgcgcaacaagctatgcgtaacgttggggaccactttaagttccgttgccgtctggatacagaaggtaagatgggccctaactgggccgtatgtcactaataatacaggagatttatcatgggtattaacaaacagtttcgcgtaacgttcgatgtaacggctactatgagtgatgaccaagagcgggagttccttgaggacctactatctcttgcgtatggcgtggacgacaaacgtcaggcgcacattgtaaccgaagcaatcaccaaaggtcatgagtcggcactggcattcgtcatgcagagcggtctgcggaaagctattaaggacctcggtaaggcgctgagctgttccactgtgacagtacgcttctctccggcaaccgtgagggtgacaaagtgagtgagtacctcaaagttctggcggccctcaagggctgccctaagtccttccagtcgaactacgtgcgcaataacgctgcgttagtcgctgaggctgcgagccgtggtcacatttcgtgcctgaccatgagtggtcgcaacggtggcgcttgggaaatcaccagtgccggagtgaaattccttaagacccatggaggttgcctgtgagaaagcgaatggtgttcgttcacccgttggaacctaaatcacactgggaaaccgctggtggcatcgtctggttttataaggatggctacatgctgagacagtcccatgtcacccacaaggaccttcatgacccgaagatgggttttaaattcaaggagttaaagaatgagtaagcacacattgttatccttcagcgactaccgggcgacccagaagattgccaaaggtgtccttgtgatggatggtgactggctggtgttccaagccatgagtgccgctgagttcgatgcctcttgggaggaggagatttggcaccgttgctgtgaccacgctaaggcccgtgagattctggagaactccatcgagtcctacaagggtcgcaagaaggcatggaagaatgctgacgttgtcctagcgttcaccgaccgtgtcaactggcgcaagctgctggtggacccaacgtacaaagagaaccgcgcagtcgtcaagaagcctgtgggttacttcgagttccttgagtacgtcttcgagacctacacgtgcgtccttgagcctcagctcgaaggcgatgacgtgatgggcatcatcgggtctaaccctctcgtgtacaactacgagaaggctgtgctggtctcctgtgacaaggactttaagaccatcccggattgcgacttcctgtggtgtaccactggtaacatcctcgtacagactcaggagacagccgactactggcacctcttccagactatcaagggtgacatcaccgatggttacggcgggattcccggatggggcgataccgctgaggacttccttaaggaacccttcattgtggagcctgtaacgtccgtgctgaagtccggcaagaacaagggccaagaggtaactaagtgggtgaaacgcgctcctgagccgggagagacgctctgggactgcattaagtccattggtgccaaagcagggatgaccgaagcggaagtaatcaagcagggccagatggctcgcatcctccgttctgatgagtacaacatcgagactggggagattactctatggcaaccgggcagctgattcttatcgtcctgaccatgggcttaatcgctcgtggtctctggatgttggccttgattatcaagcagatagtcgagcacaaagtagagtgataaactcatgggcactaattaggtagcactatagggaagtgcccattatgattattacttaaagattacttaaagaggagactcaaatgttaaaaccgatagagcacatccttaacaatcctaatgaccttcctgacgtaccgcgagctgtcaaggagtacctacagtctcgcttcaatgctgacttcctgtatcagtcagaggtccgtaagctgcgcgaggctggccacagcgaggagttcatctccggggtactgtatggtcactacatggcttctcgtgtccttgacgagatggagggacgccagcgtgcactcaaagaaggagattgattatgtgtttctcacctaagatgaaagcacctaaggtcgacacgacgactgtccctgagccagctccgctaaccgaggaacctaagggtgtccagtacggtggcgacgaggactcaaacagcaccactcctgaggcgtcagggcgtaagtcactcaaggtgaccaagacgaccgagcctacagggtccgtcagtaaaatccgtaagtcagctttaggaggctaacatgggactgttcaagaaaatcaagaaggctatctccaaggtagtcaaggcaccgctcaaggccgttggtctggcagcagatgcacccaacgtgcaaacagccgctgagacacctgtggccgcacctcaggaagcaccgaaagaggtcgtggaggacgttgagtcttcagcagacactgagtccggcaagaagaaaactcgcgcctccggtaagaagtccctctcagtttcccgcagctctggcggtgggattaacttatgattggttacggggagggctaacaaatggcagaagttaaactcgaaggcttcgcagaggagggagccaaggcggtatacgaccgtctgaagaacgaccgacagccttacgagacacgagcagagtcctgtgcgcagtacacgattccctcactgttccctaaggactccgataacgcatcaaccgattacacgactccgtggcaatccgtaggtgctcgcggcctgaacaacctagcgtccaagctgatgctggccctgttcccgatgcagtcatggatgaagttgaccattagcgaatacgaagcgaagaaccttctgggtgatgctgagggtctcgctaaggtcgatgagggcctctcaatggtagagcgcatcatcatgaactacatcgagtccaacagttaccgagtgactctctttgagtgcttgaagcaactgtgtgtggccgggaacgcgctgctgtacttaccggagcctgagggttataccccaatgaagctctatcggctgaactcgtatgtggtccagcgagacgctttcggtaacgtactccagattgtcactctcgacaagattgcgttcaacgctctccctgaggatgtccgcagccaagtggaagcagcccaaggtgagcagaaggaagacgctgagattgacgtctacacccacgtgtacctgaacgaagccggggatggctactcgaagtacgaagaggttgccgaagaggtggtaccgggcagtgaagctgagtacccgctcgaagagtgtccgtacattccggtccgcatggttcgcatcgacggtgaatcctacggtcgttcctacgttgaagagtatctgggtgacctcaagtccctagagaacctccaagagtccatcgtgaagatggccatgattaccgccaaggtcatcggtctggtagacccagcaggtattactcaggtccgccgactcacggcagcacagtctggcgcgttcgtaccgggccgtaagcaggatattgagttcctccagctggagaagtcgggcgactttaccgtagcgaagaacgttagcgacaccattgaggctcgcctctcgtatgcctttatgctcaacagtgcggtacaacgcacaggcgagcgagtcacagccgaagagattcggtacgtggcgtcagagctggaagatacccttggcggtgtctactcgattctctcgcaggaactccagctgcctctggtaagagtgctcttgaagcaactacaagccacgcagcaaatcccagagttacctaaagaggccgtcgagccaactatcagcactggccttgaggctatcgggcgcgggcaggaccttgacaagctggagcggtgcattaacgcgtggtcagctcttaaggccctcgaaggcgatgacgacctcaacttggctaacctcaagttacgtattgctaacgctatcggactcgacaccgctggtatgcttctcactcaggagcagaagaacgcccttatggcacagcagggtgcccagattgctacacagcaaggggccgcagcgttgggtcaggggatggccgcacaggctactgcaagtcctgaagcgatggccgcagcggctgattcagtcggtatgcaaccgggcatgtaattaggtagcactatagggagacgcatccagattgaatgcggtctggtccgaaggttcgagtccttcgtgtttccctcttagtcttaactttaaggagattgaaatggctggcgaatctaacgcagacgtatacgcatccttcggtgttaacagtgctgtactgactggtagcacacctgaggagcaccaagaaaacatgttggctcttgatgttgctgcccgtgatggcgatgatgcaatcgagctgaacaccaacagtgatgacccgtatggctctgatgtggacccgttcggtgaacctgaagagggccgtatgcaggtccgcatctccgctgacggttccgacgaagagtccaccgaaggtgaagagggttctgaagaagaacagcagggcgacgaagagagtcagccggaggaagcaaccgacgatggtgaacctgaagagttcaaaccgattggtgaaactccggctgacatcaacgaagcctctcagcagctggaagaacacgaagctggctttaacgacatggttgctactgcaatcgaacgcggtctctcacaggatgctgtgacccgtattcagcaggagtaccagaacgaagacagtctgtccgaggagtcttaccgagagttggccgaggctggatacagtaaggcgttcgtcgatgcgtacattcgtggtcaggaagctctggtcaaccagtacgtcgagaaagtgatggacttcgtgggtggccgcgagcgcttccagcaggtctacggtcacatgaagaccaataaccccgagggtgccgaggcgctcatcaaggcttttgagtctcgtgacgtagccaccatgaagacgattctgaacctagcgggacagtctcgtgataaaacctttggtaagaaagctgagcgctctattgccaagcgtgccaccccagcgaaacctgtggcccgtaaagctgaaggcttcgagtctcaggctgagatgattaaagctatgtcagacccacgttaccgcaccgactccaagtaccgtcgtgaagtggaacagaaggtcatcgactctaagttttaattaggtagcactatagggagactgacaacctcgcaataatggcgaccattcgtcaggtgtgagactgtgctatcagatagactaggagattatgggtgaggcctagactcccttcgagttacacaatgagtatcacctcgtttcaagtagtacctcaatagcttggcaacgataggcccgtttggtcagcgtaatgactaattctattctttaaacaacataaggagattcaacatggctatcatgcaaggtggacagcagctcggtactaaccaaggtaaaggtcaatccgcagcagacaagctggcgctattcctgaaagtattcggcggcgaagtcctgaccgcattcgctcgtacctctgtgaccgccaaccgtcacatgcagcgtcaaatcagctccggtaagtccgcacagttccctgtgattggccgcaccaaggctgcttacctgcaaccgggcgagtctctggatgacaaacgtaaagacatcaagcacaccgagaagaccattaacattgatggcctgctgaccgctgacgtgctgatttacgatatcgaagacgcgatgaaccactatgacgtgcgctccgagtacacctctcagattggtgaatctctggcgatggcggctgatggtgcggttctggctgagctggctggtctggttaacctcgcggattccgtcaacgagaacatcgctggtctgggcaaaccgtccttgctggaagttggcgctaaggctgacctgaccgacccggtcaaactgggccaagcggttatcgcacagcttaccatcgctcgtgcagctctgaccaagaactacgtcccggctaacgaccgtacgttctacaccaccccggacgtgtactctgcgattctggcggctctgatgcctaacgctgcgaactatgcggccctgattgaccctgagcgtggttctatccgtaacgtgatgggcttcgaagtcgtcgaggttccgcacctgaccgctggtggtgctggtgatgaccgcccggacgaaggcgcagaagcgaccaaccagaagcacgccttcccggcagctggtggtaaagtcaacaaggagaacgttgtgggcctgttccagcaccgttccgctgttggtaccgtcaagctgaaagacctcgctctggaacgtgctcgccgcgctgagtatcaggctgaccagattatcgctaagtacgcgatgggtcacggtgctctgcgtcctgagtctgctggtgcgctggttttcacggcggcctaagcgtaaatacctttagtgctcgggtggtaactccgcctgagtatgaggtacagactgtggctattgctggtgattcacttaaggtgacacttgatgggctggatggagtaacggactggtcaacccttgaggtaacttatggtacttcagggattgccagccacactcgccggaccaacacgctgtacttcaaaggaatcgctgtaggcgaaactctggtgactgtcagctttgacgggtctgaaaggaagacctttaagctggtcgtgactaactaataagccaaaccccttggggaccactcacggtctctgaggggttttttcgttaggagcttataatatgaacatgcaagatgcttactttgggtctgccgctgagctggatgcagtcaacgagatgctcgcagccatcggtgaatccccagtgaccacccttgacgaagatgggaacgcagacgtagctaacgcccgtcgaatcctcaacaggattaaccgccagattcagtctaaaggttgggccttcaacatcaatgagtcggccacattgaccccggatgccagcactgggcttatcccgttccggccagcctacctgtcaatccttggcggccagtacgttaaccgtggtggttgggtgtacgacaagtcaacagggacagataccttctctggaccaatcactgtgaccctgattacccttcaggactacgacgagatgcctgagtgtttccgccagtggattgtcaccaaggccagccgccagttcaactctcggttcttcggagcggaggacgtagagaactcgctggcacaggaagagatggaagcgcggatggcctgcaacgagtacgagatggacttcggtcagtacaatatgcttgacggtgacgcatacgttcagggcctcatcggtcgttaatcagaaacttaaggaggaccaaatggctctcgtatcacaatcaatcaagaacctcaagggaggcattagccaacagcctgaaatcctacggtacccagagcagggttcgcttcaggtcaacggttggtcctccgagactgagggtctccagaagcgaccacccatggtgttcatcaagtccttgggaggccgtgggtatcttggggaagacccttacatccacctcataaaccgtgacgaatacgagcagtattacgccgtgttcacagggaacgacgttcgggtattcgacctgtccggctatgagtatcaggtccgtggcgaccgctcttacgtgaccgtcaataaccctaaggataacttgcggatggtcactgtggccgactacacattcatcgtgaaccgtaccagacaggtccgtgagagtcagaacttgaccaacggtggtaccttcagggataacgtggatgccatcattaacgttcgcggtggtcagtacggtcgaaagctcgaagtgaacattaacggcgtgtgggttagccaccagctgcctccgggtgacaacgctaaggaggacccaccaaaggtagacgcacaggctatcgctgaggccctagcgactcttctcagaacggcacaccctacgtggacgttcaacgtgggaacagggttcattcattgcatagctccggcagacaccacacttgacatattcgagacaaaggatgggtatgcggaccagctaatcaatccggtcacccattacgtccagagcttctctaagttgcctctgaacgcgccagatgggtacatggtgaagattgtcggagatacgtcaaagaccgccgaccagtattacgttaagtacgacaagagtcagaaggtctggaaggaaactgttggatggaacatctcgatagggctggattacaccactatgccttggacactggttcgcgcagctgacggtaacttcgacctcgggtatcacgattggaaggaccgacgtgcgggtgatgaggataccaaccctcaaccgtcatttgtgaactcaacgataactgacgtgttcttcttcaggaaccgcttagggttcatctctggggagaacattgtgatgtcacgtaccagtaaatacttcgagttctacccgccgtcagtggccaactacacggacgatgacccactggatgttgctgtgagtcacaaccgagtgtcggtcctgaagtacgctgtgagcttcgctgaggagcttctactgtggtctgatgaggcacagttcgttctgtcggccaacggggtgttatctgctaagacggcacagctggacttgaccactcagttcgatgtgtcagaccgtgcgcgaccttacggtatcggcaggaacatctactatgcgtctcctcgcagctcctttacgtccatcatgcgctactacgcggtacaggatgtaagctctgtgaagaacgcagaggacatgacggctcacgtaccgaactacatcccgaacggtgtgtatagcatcaacgggtctggtacggagaacttcgcgtgtgtgttgacaaagggcgctcccagcaaggtgttcatctacaagttcctctacatggatgagaacatccgccaacagtcgtggtcccactgggacttcggggacggtgtggaggtgatggccgcaaactgtatcaactcgacgatgtacatgctgatgcggaatgcctacaacgtgtggatagctgcggtggactttaagaagaactctacggactttccgttcgagccttaccgattccatgtggacgccaagcggtcataccgcatctcagagactgcgtatgacattgagacgaaccagacggtagtgaacgtcaaggacatctacggtgcgtcgttctctaagggtaccgtggcaatctgcgagagtgacggtaaaatcaccgagtacgagcctacgggttcctcttgggattcaaccccggacatccgcattagcggtgacatctcaggtaaggacattgtcatcgggttcctgtacgacttccagtatgtgttcagtcggttcctcatcaagcaggagcagaacgacggcacaacgtccacggtcgactctggtcgcctacagctgcggagagcgtgggtgaactatcaagacactggtgcgttcactgtgagcgtcgataacggcagccgtgagttcaactatctggtcaacgcccgagtgggttctaatggtctacgtctaggccagaaggccacgaccactggtcagtatcgtttcccggtgacaggtaacgcactgtatcagaaggtgtccttgagttccttcaacgcttccccagtgtcaatcattgggtgtggctgggaaggtaactataccaaccgcgctaacggtatttaactgaacgtctccctgtggtgttgctcaattaggtagcactatagggagaccacactaagagggggacttaaagcatgtacataagaaacactgtaagtaatgacttcgagttattcatcccggcctaccatgacgtacttgaggcgcaggccatgggtatagaaccatcgttcccagcggttactgagtgtgtcacgttagaccacgatggttttcctttggctataggtggacactacggagaccagtgctggttcgtcacgagtgaccaagtgtggagactcgacagggctggcaagctggagttccgtgagagaatcatggagtacagggacatgttattaaatgtttacccatccctgtggaacttcgtgtgggtcggcaatggtccccacaagcggttccttaagtccatcggtgctgtattccacgaggagtacactcagggtgggaagttccaactgttcaccataactaggaggtaactatgtgctggatggcagctattcctatcgcaatgacggcagtacaagctatcggtcagtcgcgtaatgaagccaagatgattggccttcagaatgaccagatgcgccgacagtctgcccagatgattaaagagtcaaacattcagaacgctaacgccagccttgagcagaagcagaagctggaagaagccagtgcggacctgaccgctaagaatctcgataaggttcaggccatgggtacaatccgtgcagcaatcggagagggaaaccttgagggtaacagcatggaccgtatcagtcgaatcgaagagggcaagttcattcgggaggccaacgcggtcaccgataactaccgtcgagactatgcatcactgttcgctcagcagctgggtaactctgagtcgactattgaccaagttaagtccatgcagaaggctgagggcaaagataagtctaagctggagcaggtactagacccgctggcgctgatgacctcacagggtgcatccgcatatgcttctggtgcgttcgatagcaaaggcaccaaggcaccaatcagtcaggcccaaggcaccaaggtaggaggtaaataatggccagtaaattagaacaagcattaagccaactgccgcaggccgggtctacccgcatccgtggtggctcagcgtccatgcagtatcgcccagtaaccattcagcaggaagggtacagacagtccaacctagtgcagtccttggcgaagtttggtactgcggtgggtgaggcagcggatgcctacgacaagcgccaacgggacaaggccgatgagcggtccgatgagattatccgtaagttgaccccagagcagcgtcgcgaggcaatcaagaatgggaccctactgtatcaggatgacccgtacgctatggaagccctacggttcaagactggccgtaacgctgcgttcctcattgacgacgaagtggcacagcgcgttcagaacggtgagttccgtactcgtactgagatggaagagtatcgccacaaacggttgaccgaaggtgccaatgagttcgccgaacagttcatgattaaccctgaggactctgagttccagagagggttcaacgcgaacatcactgagcgcaacatctcgctgtacggtaagcacgatacattcctgagcgagcaagcccagaagggtgccatactggcctcgaaggtggaactgtcaggagtgctcaaagaccctgccgttctggcccgtccagagtccggtgagttcttccagcgctacattgacaatgcgcttaagactgggagtatccctagcgacgctcaggcgcagcaggtcatcatcgggtcccttaacgacgtcatccagcgtccgggtgctaccaacttcctccagagccttgcagaccgtccggtgaccctcaacgggaagacctcgacctataaggagctgatgggagaggagcagtggaacgccctgatggtcaaggcccagtcgactcagttcgacaatgacgctaagttgtctgaaggtttccgcctcgggattaccagcgcgttgaaccaagacgacaccagtaagggctgggagatgcttcagggtgccaaagcggaacttgaccgtctacagcccggtgagcagatgaccccagagcgtgagcgtttgattcaggctgaggagcagatgcaggcccgtttccgtcaggaggctcaagcagcagctaaggagatggacaagcgtcagaagactatcaacaagaatcaggtcatcgaccagcagttcaccaagcgtatcaacggccagtatgtgtccaccagctacaaggacatgccgaccaacgagaacactggcgagttcactcacagtgacatggtgaactacgctaacggtaagctggccgagattgaccagatgcagctcacggagcaacagaaggaccgcatgaagctgagctacctacgggcagactcagagggtggagccttccgtaccgttgtgggccagatggtgaccgacgctgggtctgagtggtctgccgctgttattaacggtaagctaccagaggacaccacggcgctgaacaaactgcgcaccatgcgtaacaccgacccggacctcttcgctgcgctgtacccggacaaggctgacttgttcctgacgatggacatgatggacaagcagggcattgaccctcagattctcatcgacgctgaccgttcccgccgcagtctcaccaaagagatgcagtacgaggacgataaagcgtgggcgtccctgaagaacaactcagagtctcccgagctgtcccgcattccggctagtctggatggcatggcccgtaagatttacgacagcgtcaagtaccgtacaggtaacagcgacatggcgatgcagcaggtcgacaagttcctcaaggaatccactgtgaccttcaaaggtgacgacgtggacggtgataccattggtattatcccgaagaacatcctacaggtcagtgatgaccctaagagctgggagcagggacgagacatcctcgaagaagcccgtaagggaatcatcgcggctaacccttgggtgaccaacaagcagctgacgatgtaccagcagggcgactctatctacatgatggacaccactggcactgtccgaatccgctacgacaaggagctactgacccgaacctatcaggaacagcagcagcgactggccaaggaagccgaagagaaggcactgaaggaagcaaccaaacgagcacctattgccgcagccactcaggcccgtaaggccgctggtgagcgtgtccgtgcgaaacgtaaagccactccgaagttcatctatggaggtggtgaccaataaccattaaggagacaacatgagctacgataagtctaaacctagcgattacgatggcatcttccagaaggcagcagactctcatggggtctcctacgacctcctgcgtaagttatcgtttaacgaatcatccttcaaccctaaggccgtctctaagactggccctaagggcatcatgcagttcacccgcaacacggcccgagcgatgggccttaacgtgaccgatggtgacgacgatgggcgatacaacccagagttagccattgacgctggcgctaagctgcttgccagtctcgttaagaagtacgacggggatgagctgaaagctgccctagcgtacaaccaaggggaaggcccagcgggtgcccctcagctccaagcgtacgacaagggagacttcgggtctatctctgaggaaggccgtaactacatgcgcaagctgctggatgtggccaagagtccgaactcaggcgcactggaggcgttcggcggtatcaccccaaagggtaaagggattcccgcagaggatgccttcaagggcatcgctaaggctggcaaggtaggtactgagctgccggagtcccatgggttcgacgttgaaggtgtagcacaggaagcacccaacactccgtacgctaaggacttctgggagaagaccgggacgactctcgacgagtataacgctcggtctaccttcttcgggttcggtgacgctgctgatgctcagattcagaactcaacattaggtgtggccttccgtgctgcgcgagccgacgatgggtacgatgtgttcaaggatacgatgaccccgactcgctggaactcttacgtcccctccaaggaagacttacagaagctgcgcgactctgggttacctccgagttactacggtgtggtgactggtggtgacggcgagaactgggatgcgctcatcaagctggccaaggataacttcgaggctgaccaacgggccgctgaggctggtactggtgcgaaactcgccgctggtatcgttggtgctggtgtagacccactcagttatgtgccgcttgtcggtgtggccgggaagggactcaaggtggttaataaggccttgcgagtaggtgcacaggctggagcgctcagtgttgcctctgagggaatccgtacgtcagtagctggtggcgaagctcactacgctgatgcagcacttggtgggttactgtttggtgctggtatgtctgcccttagtgacgctgtggctgctggtatccgtaagtctcgtggagtcgagtctgtgaatgagttcgctggaccagcactccgtatggaagcccgagagactgccatcaacactggcggtcacgacacctcgacactgcctccagagaacttctcgttcgagcagaaccacagaggtgttccgtttgctaaccacccgaccgaagagggagcagtggttctggccaatggttccatcctgagtgataccaacccgcttaacccaaggacccaacgtgacttcgcagagattgacccagagcgtgcagctcccggtatcaagctcggcgggttcactgagattggcctgaagacattagggtccaaggatgctggcgtccgtgcaatcgctcaggacctcgttcgttctcctacagggatgcaatcagggtctagtggtaagttcggtgcgacagcttcggacatccatgagcggctccatgcgactgaccagcggatgtacaaccaactgtatgacgctgttgaccgtgccatgaaggacccagagttctccgtaggtgagcagaagatgtcacgcagagccatccgtcaggaagtctacaagcgtgctgccctagcgattgagcgtccagagttacaggctgatttgaccaaaggtgaacgcgaggtgatggacctgctgaaagagcatttcgacaccaagcgtgaactgatggaacagccgggtatcttcggcaacgctaacgcagtgagcatcttccccggtagtcgacacaagggtacatacgtgcctaacgtgtacgacaggggtgctaaggagctgatggtgcagaagctgggtggacctgaaggactccaacaggcaatcgctcagagctggctcaccagttaccgagtgcggcctgaggtcaaggcacgtgtcgacgagtacctgatggaacttaacggctacaagtcggtagaccaagtgacacctgaggtggtccagaagcacgccatggacaaggcttacggtatcagtcacacagaggacttcacagcgtccagcgtcattgacgacaacatcacaggtctggtcggtatcgagaacaactcgttccttgaagcccgtaacatgttcgacagcgacctcccggttaccttaccggatgggtcaaccttcagcgtcaacgacctgagggacttcgatatgtcacggattatcccagcgtacgaccgtcgagttaacggtgatatctccatcatgggtggtagcggtaagaccactaagcagctcaaggacgaaatcatggcgttagacaagcgggcagaacgtaaggggcaactgaagggcgaggtggaggcactgaaggataccgttaagattctcactggccgtgctcggcgcaacaatgacacagccttcgagacggctatgcgttccctgaatgacttggcattcttcgctaagaacttctacatgggtccgcagaacctcacagagattgctgggatgttggctaagggtaacgttaaggcgatgctacatggtatcccaacgttgcgagacctcgccaccagaacctctccagtgtccgggagtgaactccgtgaactccatggggcgctgttcggtaaggaactcgaccagttaatccgtccggggcgtgaggatatcgtacagcgaatccgtgaggcttccgataccagtggggccatggcgtcagtcattggtaccatcaagttcggtactcaggagctgtcggctcgttctccttggaccaagatgctgaacggtacggctaactacattctggacactgcccgtcagggtgtgctcggtgatgtggctggtgcggccctaggcggtaagggttccaagtttggcaaagagaacttcctcaaagctgcctctatcagtcctgagcagtggaagggaatcaagcagctctttgtagaccacgctactcgtgacgctaacggccagttcaccatcaaggacaagaaggctttcagtcaggacccgagagcgatggacctgtggcgtcttgccgataaggtcgccgacgagaccctgcttcgacctcacaaggtatcccagcaggattccaaggcgtatggtgctggtgtcaagatggccatgcagttcaagaacttcaccatcaagtcactcaacgccaagttcattcggtccttctacgagggctacaagaacaaccgcgctatcgacatggcgttgacccacgtgttgtctctgggtatcgccgggacttactttgcgatgcaggcccatgtgaaggcgtacggtctccaagagtctcaacgtaaggactacctgaagaaagccctgaacccgaccatgctggtctacgcagcgttgactcgaagttcccacaccggtgccccgctgtccatcgtgtcgatgattgcaggtgccgctgggttccaagacgcaaatatgctgcgctccaccatcttgcctaaggaggaacagttccagaagaaagacggggcgtccaaaggtcgggccgagtcgagcaaccttgcaggtaacttggggtctcaggtcccggctcttggttacgtagggaacgtcattgcgaccgctaagaacgcctacggtgttgctacagcacctaataagccgactgagcgtgactacatgactggcctgatgaactccactaaggagcttgtgccgaacgacccactgactcaacagcttatcatgaaaatctatgaggctaacggagtaaccatcaaacagcagcctaaacccaactaattaggtagcactatagggagaccagcacggtttcccttctcattcaactaaaggaggtcacgatggaccaagacattaaaacagtcattcagtacccagtaggggccactgagttagacatcccgttcgactacctgtcccgcaagtttgtccgtgtgtcgttggtgtcagacgacaatcgaagactgctgagcaacatcactgagtaccgctacgtgtccaagaccagagtcaaactgctggtagcaaccactggtttcgaccgtgtagagattcgtcggttcacatctgcgtcagagcgagtggtggactttagtgacggttctgtattgcgcgccaacgaccttaacgtctcacagctgcaatctgcacatatcgccgaagaagcacgcgatgcggcacttctggcaatgccggaggatgatgctggcaacctagacgcccgtaacagaaagattgttcgactggctcccggagagactggtacagacgccgtcaacaagaatcaactggacacaaccttaggtgaggctggcggtattctcagtgaagttaaggacctccagaaagacattgaggattacctacagaactggggagatgacaccacagctattcgcggcgttctctgggtatacaaccaagggtccgcagtgggcggtgagacctccctcgtgattaccaaagaggggcctgtccttgctgttccgtacatcgagattaacggcagccgtcaataccgtgggtggcactacgagtatgacttagggtccaagacaatcacgctggcgaaaccgctttctgctggggatttggtcgtatgcaccaccgctgagactacgctgccactggcggattcactcgcaggtccgactggtgcttctcagattggtaccgccaacggactgaatgtgcagattgcactggacaatctacgctcaggggttaacgttctggactttatgacctttgctgagcgagccgctgtcctgaactacacaggaaccaatgacaactctgaggcattccgaaaggcattcgccaccgggacacgccaaataattgtccctccgggaagatatcacgtaaaagacgttgtaatacccgctaaggtgaaactgtttggtacgtactcctacaagccttataacgtgacaagtgatgcatcctttggtacagacggtacgattattcgtaaagtggctggcgcagataacatgtttctgtggaatactgcgtgtgctgctgagggtgtcatgttcgatggtcgtgaccgcacgtccccagccattcaatcacagtctggtggtaaaataactgtagggttcttcaagtgcgggttctatcgattcgaccgagtaggtaaccgccggggcgcatacatcgggtgctccttccagttctgtaacttcaaccagaacaacattgggatttacaatacggtagatgggaaccacatcgggtgtaccatcaacgccaacaagtcccacggtgttatgcttgaaacaggcgcgaactccaacacgttcactaactgtcgaaacgagtggaacgaaggtgacaactggaacttctatggtgccacttcgattcaggtaatcaacgaactgtgcgaccgtgcgttcggctatgggttccgtatcagcaactcctcggtgacactgattaacgtcaacattaggcgttctgcgagaacagccgcatcgggggcagcaagcgctcagatttactttgagtcgtctaccctcaagatgattggggtgaacagctccgtgggcggtgatgacactggcggttctatcactgagccttcgcctgattacttcttcaggatggcaggtaccagcaagggtcgccttgagattagtgacagtcgcctcacaggctatactgttgggctaatctcgggtacagcacgtccttcagttatccgtgtgataaactctccgggttgggaggacacgattaacgagggggtcgctcgcatatcaggaggcaggccgtacattggtacaatgccaacagcgactggtccggcaaacgttagcccagctgtattgggactgtcctgtggtggagtaaacacctacgataacgacatgtttgatattcacctgactatccgcaataccaataacggaggccataatggtgcaatcctcactgtgttgctttaccgtgagggcggagccgctcgtgcgacaatcgtacgagtagacagtcggtccaatgccgtgggtgagggagatgtgaatagcacctcagcagaccctcagcagacctatcaagtgtccgtggaggttacgtcaaacgatgcgtctactttcaacctactggtctccaccaagtcggacaacaacgcatcctaccgcttcagggcgaaagttaaaccataaggagaaccacatgttagacagactgaatcagccgaaaggctcaaccattggtgtgctcagggatgggcgcactatccaagaggctattgatgacttgtatgtgtttaaggattctcaaggattcataaacgtggacatgcagactggtgccaccattgaggagaagctgcgcaattcctttacgatagccaatacgctacttgtgggcgtacgcctgacggctggtaaggtatacccgctgactggtacaactccgcttgaggtgaacctagctaagttctcgctgttcacttcaggaggccgtgctacgattgacgcctcggagttcactgggccgactgcgttgtggattcacgccacaggctcctatcctacacctatgtatcgaaacacgaccaactacatggagtccatcgagcttgtgggtgggcttaaggctggcgtcgacgggtggacttggggtaaccgtgggatgaccaccggaaccgagtacaacggtcagtgtataatccgtgggtgcagcgtttacaagttcgacaactgcatcaaatgtactgactcgtcttggcgctacaaggtatctgactgcatgatctctacgggaatcacctctgtgttcaacgcccctgctggactgattgactccggcgagtccataaccttcagcgacactcagttctccgactcgaacggggctaagttcatcattgcgtgtgcaaacttcagtgtaggcatgtctggcacaagtgtgctcaataccccggttgttatctctgggaatggtgcttcactactcatcgacggcatggggaacaacgagaaccccggtaaaagttcttggatgcgctacgtcgaggtgactggaatcggagcacgcttcatcctacagtcctcaacgctcgtgtgtaacggcccatcttctcagaccagaccgcttgtgcttgttggggcgaaagctcgcgcaatcttcattgccgtcaagttccccggtaacctctatatgttccatgtgaataacccagagaaggtgcgaacattctgtgaaggcgagggtatcgttaagacaatcgcgtgtacatacgacattgaatcgggggctggtaacattccagtccaccgctcacttaaccgattctacaataacgggttcgagcaggacttggctggatgggcgcttaacgttggtggcgacccggcacagacggctacaatcgtcacggatgataccaacagcggtggtaaggcggttaaggttgcctctctggatggtaagagtgtgttcctcacccagaatgtcagagtgtcttctggagaggagtttgcatcgttcgtggcctacaaggtcaataaggcggcatccggctcaacaccgggcaacctgacagtaaccttaagtccgagaacggtaccactatcggtacaggctcgacgtctaacttctcgaacactgtcggggtgtggcagcaaggtggcctgttctgccgaggcgttgccccagtaggtgctgtatccgctgagatatctctccgtgttcgtgatggtgctgaggttatccttgatgacgttatcgtaaacttcttgtaacacggaggtatcatgttatccctagacttcaacaacgaagttatcaaggcggctcccattgcgggggtcgctggggctgatggcgtagcgaggctcttctggggcctctcactcaacgagtggttctacgtcgcggcaatcgcctacacagtggttcagattggtgccaaggtagtcgacaaaatcattgactggaagaaagctaataaggagtaacatatggacctgattaagttcctcgaaatgctagacactgagatggctcagcagatgctcatggacctgaagaatccagagaagcggacccctcagttgtacaacgccattggtaaactgctggagcgacataagttccaaatctctaagctgacccctgacgttaacatcttgggcggactggctgagggtctggaggcttacaactccaaggtgggcgctgatggtctgacagacgacgataagttcaccctacagtgatatactcaaggtactactatatgtagtgcctttatggatgtcattgcactacgctaggcgttcctacgtgaaatctgagaaacaacgggaggcattatgctggagttcacaaagagaatcgtcccgtatcttgtggctatcatggtgtttgccttcgggtggcacttgggttcgcaatctacggacgctaaatggaaggaggaagtacagaatgagtacgttaagaagcaaacggctagagctgaaactcagaaagcgattgacgcagtatcggctaagtaccaagcagaccttgaagggctggagggcagcactgatagggttattgctgatttgcgtagcgacaataagcggctgcgcggcagagtcaaacctaccagtgtcaccgcaggaccagacggtcgatgcctcgttgatggttccgtcgaactacacgaagcaactgctcgaagtcttatcgcaataacccagaaggccgacctcaaagagaaggccctacaggacactattcgcaagctacagcggaaaggaggtgaatattgagtaactctcagcaagccaagaacgccttaatcattgcgcaactgaagggtgactttgtcgcctttctcttcgtgctctggaaggccctgaacctgccggaaccaaccaagtgtcaaatcgacatggccaagtgtctggcgaacccaaagaacaagaagtttatccttcaggctttccgtggtatcgggaagtcgttcatcacgtgcgcgttcgtggtgtggaccctatggcgtgaccctcagttaaagatactgattgtctcagcctcaaaggaacgtgcggacgctaactccatcttcatcaagaatatcatcgacttgttgcctttcctgagtgagcttaagcctcgccccggtcagcgtgactccgtgattagctttgatgtaggccctgccaagccagaccacagcccgtcagttaagtctgtgggtattacgggtcagcttactggtagccgtgccgatatcatcattgcggatgacgtggagattcccggtaactctgcaacccaaggtgctcgtgagaaactctggacgttggttcaggagttcgccgcactgttgaaacctctgccgactagccgtgttatctatctgggtacccctcagaccgagatgacgctctacaaggaacttgaggacaaccgtgggtactccaccatcatttggcctgcgcagtatcctcgctccaaagaggaagacttgtactatggtgaccgactggccccgatgctccgcagtgagtacgatgaggacaaagagggcctcagtagccaacctaccgacccggttcgattcgactctatggaccttcaggagcgtgaggtggaatacggcaaggctggctatacgcttcagttcatgctcaacccgaacctaagtgacgccgagaagtaccctctacgcctccgtgacgctatcgtgtgcggtctacagatggacaaggccccaatgcattaccagtggttgccgaaccgtcagaaccgcaatgaggagcttcccaacgtgggcatgaagggtgacgagatttactccttccatacagcctccagtaacactggtgcgtatcagggtaagattctagtcatcgacccaagtggtcgcggtaaggatgagactggctggtgcgtactgtacaccctcaacggctacatctacttgatggacgctggcggtactcgtggttacgaagagaagtcccttgagttcctcgctaagaaagcaaaacagtggcaggttcagactgtggtcttcgagagtaacttcggtgacggtatgttcggtaacgtcttccagcctgtgctcctgaagcatcacccagcgcagctcgaagagattcgtgctcgtggtatgaaagaggtacgtatctgcgatacccttgagcctgtactggcaagtcaccgcttggtcatccgcgatgaggtaatccgacaggactaccagacggcacgggacgcagacggtaagcacgctctgaagtacagcctgttctatcagatgacccgtatgagccgtgagaagggcgctgtggcacacgatgaccgacttgatgcgttagcattgggtgttgagttcctacgctctacgatgcagcaggacgctgtgaagatagaggctgaggtacttcaggagttcttggagcaccacatggagaagcccctgagtaacatctcccagttccgggccaccagtagcaacggtgtggacatccggtgggaagacgatggggatgacactatgttcatcgcatggtgattatgcagggattgtgcataaggattcattaggccacggaaggccacttcaggaaaacttcaggcataacagacacttggaattaggtagcactatagggagagacccctaaagacttactataagaacacttaaagtttcattcatatagttatgcactataagtctcctcacaggtagagggtagtgatgataatatcaccctctcactataagacactaagagctaacacaaggaggacctatgcgcttattgttaaccttactgcgccataggactacttggcgatttctgctggtacttgctggtgcccttggggcttcacttgttactaagcagcaactcagtggactggagactctcatgtgctctctactcacttgtagcgattagggtcttcctgacgcgctagggattccgtagtgatgcttatcagcatacaccactccatccctctacagtcaatacttaaagttaaccttaggtgattcactgggtctacctacgggtctatgcactgacctgaggactacctgaggttacctttaagaattttacataaagttctgagtgtacatctcacagtttaaacttttggttatcccccccccggtacctccagttcacccaaagtaaccatggggggccttaaaccttcggtttaaccttaggtgggactgatgggaaaccttaggtgatactatatgttgtggtgttggtgacccaatgacactatatgttgatgcctctgtgtccctatctgttgggcctctttaagtatccacctgaggtaatacctgagaccatacaccttaggttaaccatgtgaccatccagcgagtcatcactataaggttattcattgtaggttgtcaatacaccaaccaattaggtatcactatagggagacactttaagtattactaagagaccataaccataaagataactatcactacaggtctaactaaaagtttaactttaagtattgacattcggattacgttatgagacattagcagccgttgagagacacaacgctacaaaccactagcatacttcgagttactagctggatgctgaatggtctcaagtagtcatcaaccggacatacgaaagtggttgactcaacgatgaacaagtagtaagatgcaccacagattcacgaagtatcgctctttaacaatatggattagctgacatgtacatcactcatcacttagtgtttaactagtggttacattcaggtctctggcaaggtacgtcctgtcaccctgagagtagccacgatgataaccactaatcaactgaaggatatacatcatgatttacaccaaagagccagctaacaaggtattcgtgttcgttactgcttaccgtggccatgagtcgctcgaagttaacgagaagatgctcaaaggtctcattcgcaccattaagacctatccgggtgcatacggcaacattcgtaatgagcacgtgcaaggctgctttaaagaagctggtatgcctgaggcaacgcaagaacgcacgcttaaagttgaatgtactgagaagcaagccgcagagctgacgtggctggcctgtaagacctactcgcaagatgctgtgctggtggtgaactcacagactcacacggctgcgctatggtctatcgaggatgtaggcgaatacccacaggtctacccacgcttgaaagaggtgtccttaggtggcacgctgcaacaagtagatgcaccaaagggcgaatgctattcagtgattgacgggcaatactgggaggttgtatgaagcactacggcctcactcagcaggacatgcaggaataccgcagcgcctttaagacggcctgcgagtgcactgctggcacacctgaagcaaaggccgactggttcggctattacatggcccagctggcccaaacctaccgcacacgtaaggtaatgtatgataaccctgtttgtaattagcgtgtacgccctgattgtcctgtactttgtgcgggactttcacaagggtctcaaggcgcacaaagcatcattcagttacatgaagtggggcgtgctgcctcgctttactgtacggctacctaatggccgctttaaggctaacaaggtaggcattttctacatcgcaactcattgactcatcgcacataaggaaacaacctaatgaactacaccgatatgcaagaacgcttagacgccatccgtaacctgccaatctgtgaactcgacaagcgccagccgctgctggtagcactcatggcggacattgtgaactgtgagacatccgacggtgacgatacggacagtgattggggtctggagcgtcaggactactggcaaaccctgaagattaaggccaaagacgccgggtttaacctgctgggcaatggtcacttcagcgcagcgtttaagcacgagctgctaccgggtagggtcattaaggttggctttaagaaagaggactcaggggccgcctacgtggctttctgtcggatgcaccaaggccgagtagggatacctaacgtctaccacgtagcgcgtcacgctgggtgctacacggtggtgcttgatgagcttgagccgtgtcaacgccgtgagaacgatgagcacgaccactacgcagacctcgcgtattactttgtcgagggtgaacctgaccctgaggactacgcggaggctgaccgcccgtttatcgagacgtgccaaatgattcgcaagttcttctacgggattgcgtcctttgatatgcacagcggaaacatcatgttcaccaaagacggcacgccagtgattaccgacccggtgtcattctcagcggaccgggaccgagagcctttctcactggaacctgaggacctgctcgcagagattgagcagatagcacacgacaagatgattgaacgctgcaagcgcaacaaggctaagcgcaatcctctggggacctttcagagagatcgtaagcatatcaacaaggcgcgtcgagcacgtcgtaaggcacacgctcggtggcgtgaggagcgcgagcggattaacgctgaggccctaaagctcgaccttgcgaaaatcgaggagcgggtactagcgtggcaagtgggacccggcctagcgatacagcagggcaagccattgcctatagacaactaccttcagggtagactcatgggctaacaaggtgtatcttaggtgtctctcacgcaagaggcacccatagataaactttattcacaaagaggcacaca

SEQ ID NO: 54 - DNA, 176962 bp, unidentified
  source 1..176962: mol_type = genomic DNA
ttagtaatggctaaaaccatatgtaacatcaatcatgactttataacggcatacacgcatttttgcgttattgtaatccactgggatcgctaccacgtcagcaggatccacctttacctgaatgactctaccaacaccgcccccgtagtgtggaaggtatgatttagccgcaacgtgtaggccagtagaacaggtgcgcgttttatcttcgtctaccatgtttcgaggcatggagacagtcacaccaggactattatcaaatttgccagtagcgagatctttatagttatcgcgtacacgtttccaggcaagaaaacaaccatcatcggtcagttcaatgtcattatgtacaaggaacccgtaaagctggtataccgcatcgcgtgaagggtttcgcatcaaccgttcaaagaagtttaccaggtgttcatacggacgatcgttatacatttcgcgaatgattcgttgagtgatatcagaatcaaacactacatctttatatagaagctgatgaccaatgattttaatgttgcctttgctataggttcggatcgcttcttgagtatccaaacaagttacagcacctttgacatcaccagctttcagcatttcatgcgctttcttaaagttcggatgtgtttcacccgccatgaaaacgcgcccttcgtatacaaccgtaatgaacgattcagatccgatcatacgcggtacagtgtctgatactttaggcttttgttttacatcccttttcttagggaattccgctaacttgcggttgataacgcgcccaatggttcgggcgcttacgttgaactgttgggccagtgctgttttacttgcccccgtcaaccatccattatagatagctttctgttgtacttcgtcaagaattttgaccattatttccaccgtattaatttcttaaactcactgagattcttttcgttgttgtaaatcggacgaattgaataagaatcgctatgttcaacaagtgaagccagtaacgggtttagtgatttaaagatttcccatgcctgatcaacacgttttttcatattgctgcgtttaacgcgcattgatgctacagattcacgcagaatcggacaacgcgccctggaaagatttttaccatctttctcatacccttccagacacactataagttcgagggtatcaacaatcttatacagtttttcattatatcggtttttcacaatccgatcaagcgatacaccaaaacggctatgcaatgcgtttgtttctgttgagtgttccttgccaatccatccaggcaagcaattgtctttcaatgccttttcggatttaacatactgcttgcacagcatatcatcaaagcataccagatttgaatctgggatccacttccagaggctgttacggatagcaaacacaacagggatcccagtatggcgcatgatacgcgataaagtagattctttcattgctgaatccatagacaacctggaattttcaccatctaagcggctatattcatcaataccatacaaccgaacacctggggctttatccagtgataaaaactctgattttgtcataaacagagaagtttttgccagattgccgttactatccaactcataacgatatacggtcggggtttttgggcgcggttctgaatttttcggtgcatatagcgcttttgatttttcgcgatctgcatcatagatctctttttcttttgtcatttcactggtacggagatacacaatttccgattcatcaaaatgacctttccgaacgatatcattaacaatctcacgctttgaatcactatcgtaatatgcaacaaagctaacacggcttaggttatgcattttcgcatacccgacgatatacggtttaaccgtgttggtatccacttttaacagaatgagtttcttctgtttccacggataataaatgcgtgtgatgtcctggcgtttggttgtttctggcttatacttgctccagcggcctccgctacccgttacctgataccatgcatctttaccgtcgtattcgttcgcccaatacccagcaatataatcatcattatatttgtttggtttgactagttcgctatggatccagccaatagaatcaccgttgatgcgaaaattagcatctttaccaacaaagttttgtaccattgaaggcagagaatggaaccacgtcagtttatcacgaacggtttgtaacttatcgaattctgatttaactcgattgaaatacacccggctgatttgtttcagacgttctttaacaatccctactgttattttatccatactcaactcttcgcgagaaggcatgaaatcaagttcaccgatcgggaagtcaataatatacgtatactggctttctgtatagcaatagaacatcgaggtatcatacaaatctttatccagaggataaatgatgttacccatgcgagcatatacaccgctagtgtatgctgatttatgacggatcaccccgctatcgttggttgcttctttcggctgatagttgattttgagaatagaagcaccaacaaagttaggacgaatatcagtaaatgattcgtatacccttgctgcttcgttttcccattctttgatatcttcaactttaaccggaacagtgatagtaaccccgttaggttcatcactttcaatctcatacagaggatcgcagaacggttccccatcatccatatagattgtgtaaccgcatttgataccgtcttttacagattcaactgtgaacgcatcggcatagcaaagcggagatttgcaacccagacccatagaaccgatcaggtcgtttgaatcatttttagttgattcgaagtaaacggtaaacgcatcactaacgaaatcaggagacataccgatcccgtagtcacgaataacaaaacgaggatcaacagcagttggcaactggacatcaaacgggttctgatttcccgcttctttgtgtccatcgatcgcattacaagacagttcgcgaatgattgcgcggatcttgtatttgtatactgtcgaagaaaggatcttatacgctttcttgtttgcgcgtagagatagtttgtttcgtcccttgctggtatctgtaccaactcggtagattgtttgcggtgtatcttcgcgtaatttcattgtttatttctcacttaacattaaaaataacttggtcacaagagtacttcgttggctttttgttcaggccatattctactacttcgcaatatgtgtcaaggaattttactaatttttcttcctcgacctgctgtttcttcatatcaagtataccccacacgatagccccgataatgatagaaaagaacgcacaaaatccgaatatggtcagatattttcccaacttaggcgcattacaacgtgtcataccttacccctctttgcgaatgtatgcaagttcttcatgggttactggacggatatacagacggccttttgtatatgccttgcgcccactgatccaaatgtttttcatatccttaacaccgttcatcacatcgttgtaaaacttcttatcagctttagcctgatagacttcacggccttgataatctttcatgaacaaacagtaaaggatctcattcttatcaaccagattagcatcctttgtagttgttttactcggtgaaggtttagcacccaggcgcaaggccatagcttgccacactttaccatgttcataacctcgcccgacaagagcatgagcgatttcgtgtaaaagagtgtctaaaatatcctcgtagatatcttccgcaacatgacgaccagatagttcgatcaattttttggtataactgcaacggcccagagtttttgtaatgcgtccattgatccggaatgtccaaccattactgatcaaaccgtgtttttccatcatggtacgcgcccagtgggttacttccattgcactacgagttttcaacattttagaatctcctttgcttggtacaaaaccaatatagcaaaaagccccctgcattgcaagaggctttgttattatttcaacttcttagaaagttcttttaaatcattgagatactcaattttaggggttgtttcttcccagtatttcaactgtttccgcaattcttcggcttcgtcttccagctttttgctttcgtccgtggttagatggtagatgttcatagccactaacatttcggcatgattctcgcaacctatccacgtagacacgaatttaaccgcttcgctgcgactaaggccacgcagagaatcaggagattctaccatttgagcaataaacgcaacctttgccagtgctttatctaacgcttccttagtttcctggatacgcttattgatacgctgttgatatacattcatacgaatatcaacgaaatcctttagaagcgtttcagggcgttcatatgagtatagtttgccctcaaagataacgttaatgtttgggtttgaattttcaatcaacccgaaatctttcaggatcttttcgcgggttaacccattggcatactctcgcttgagcgttacttcataacgaaaatcttctttcgatagatccttgtagctaacgataacgcctttttcttccagcttgtcaaggattgcaatgtatttcacacggtcatacttcactgggatctcggtgatcaccaatttggttttaccttgcaattcatacgtgccgtaaattgtcccgtctgtgatttcacctttaaagtaaggatatttcagatccagtgtgaaatctttatcattcagatatgcaatgcacccgttaacaaccgatttaggatcatgaggcggaatgtttgttgcatatgcttttgcaatcccgctaaacccgttaaccagtaccatcgggatgatcgggagatagtaagctggcggcacatgttccggatcttcatgaactggcgttaaatcaccatccatataaattgctttgaatattggcgatagtttgcacttgatgtaacgaggtgcgccaggtttcttaaccaaacgggaaccaaagaacccatcacggtcgaataacggaatgttattgcaccagtgcgccgccataagggataacgcttcttctacagaggtttccccgtggtgatacccatacatagcaacaccgccagcgatagaagctactttctgaaatcccgttccgccctgcatagcagagtgaataaagaaacggtgaacgggtttaaacccgtctaccaggtgcgggatcgcacgtgaataaatcgtgtaaagggcaaacgttagtccttccacctgtacaacatctttaatacttctttccattagtcaaccttagaaaatttgtgttttccattaacccaatctttacgcggatcagattcgtcgccgaagcatagttctaacacttctttgtattcgtcgtcaagtacgatgacatcatacttcaactgatcacccagaacacggtcgtaatcttctttgcgtaaagaacccagccccttgatatatcgtacatcttttgctttatcgcggaacggtgcgaactcatcaagagaatagaaccatttttcctcgcgcccaactttagcgataacgatcggggttcgaatatatcggatccgtttctcagtgaacaaagaaggccaacggctaaagaatgcaagcaacagagttaaaatgtcgccgccgtcaacgtcagcatcgaccatgatgccgatattatcataagtcattccggaagtatcaccaggatgaatattgaggatagccattagctcaaacagttctttgtttttgataatgtctgtaaaactcataccccatgtattcagaggcttaccacgtagcgggaaagcgccttgtgtttcttcattacggcattcgatgaactgaccaacagcggaatcgccttctgtcagaaacaatgttgtttctaccccaggggtatcaataccggaagccggaacgtgtttagcaatttttgcctttttcgctttctttttcgctttggtgatcgcggcggcttctgctgcttgtttacgaatcaatgcggattcaatgatcggagtaatgatttctggggtatccataatcatttttgcgatctttttgtagttcaaattcgcatgattgttaaactcacctgctgtatttgctaatcgctcttttgtttggctatcgaatgcaggtgcattaaagttatgcaggaataccacaagagttaagcattcttttacacgtgctttcgggatctcgatactatgctttttcttgatcatcggttcaagttcagaatagataccatcaatcatacactcaacatgaacaccgccgtttttcgtatccagaccgttaacaaaggatttctgtttaaacccgtcctcagtgctcgccagaatgaagctgaggcgattatttgtctggacaatggttttatccccatacatggaagcgtacagcgggaagcgattagagagcgtttcgccgttatatgtgaatttcacagacgggaaagcaacggcaagggccattaagcgatccttaatcacttctttggtttcttcatcgataccagttacaccaaacatagagaagtctggagtaaacttaacagtagtaccctgttctttactggggctggttcggtaatcgatgttctgtgcgccgtccgtacagttaatggttactttgcgtttcccgtttgcagtctcgccaataaaaatcgagctataacagtttgtcaggaaagaaccaacaccattcatacccatcgttacgcggtttttatcatcgaagttagaacccgattttgccatagtccatgccgcaactggtttaggaactattttcccatctggggtttttacatcatcctggggaataccgcgcccgttatcagagattttaaccagattatgatcaatggttacatcaatcttattagcatgtttgaattcagttcggatcgcttcatcaatcgagttatcaaggatttcgttgatgattttaaccaacccttccacgtactcaaccttgcgatattggcccattatgaaacgttcatgcgcttctttgttaaccgatccgacgtacatatttggacgcaaccgaatatgatcgcgatcgctcatacaaaatgattcgtcaacctttgcgccttttttggctggttgtggtttctgttctggttcatcatctgccagaagaaaatctaaactcatattcacctctttgtttaatcactgacattatatagggttctatgaaaaagaaaacccctttcggggtttacttgttataagggaaaccatcacgaaccatttgaggtttatcaaccgttcgttttgcttcgcctccgcaatcgcaatctttcggtgcatcacgggtagcaatgcttgccatttttggaaattctttattacacttggtgcatttataggtataggtaggcattaataaatctcttttaaacttaacatcttaactaaacgggctttgtctatgtcaaaaacacattgacgtgcgcccggatacaacttttcaacttcgtataccatgcagacgaaaccaacattgtgcatgtactcgcgttcatatgcattgaaccaacgagaaaggcgctgtattgactgaaaaccaaagtataacccagccgcttgaaagtctatgttatctttttcaaggttgcgcatcaatcgattatcgtcatccggtgctggatgtcggttatcatccatatcaatatagatatcaggattcatacagaattgatccaaccattcagcagtatccattgacacataacgattgacatatgggccgctttttgtttgccatttttctgtacaatcattccagaaagaacaagaaaattccacacgatatacgaacatgatataatcctcacaagtaaactcaaggtttacaagtacgataccacttatctaatttttctgcaagcatttcgttgataatttttgcaatttcgtaccgtccgtgagtagtacccagttccaggtaaatcacatcaagtgcgcacacaatcgcatcaacactttcttcaacgatattaccgccgcgttgaggctgaatgaggcattcgctgatctcgccaacttccgctgataggtgatgaaccacatcactcttcgtgcgtttcttcactttatgagcgatttcgaaaaacttatcaagtacgatcgccgtttcttctcgcgttgcagtattctcggatgtcgtctccgtttgttgaacaacgtattttgtaaaatagttttcaaacacgttgaaagggatcacatgaggaacaccattcaaaaacaccccttctttacaaacataatggatttggcgcggaatagacaacccgccgctgcgttccaaatgtcgtttaacgcttgctacaaaatcgaactctttcccgtatccagccgacatactgtgatacgtgagtaggccaaatgcagaaacatagagatcattttctttatacagattcatttacaatacctttatggtagccaaaaatataacaatcaattgaaggacgttcaccagggaagtgaatgcattgcatgatgcgttcagccattagatcttctcccatgtataccgaagtagtttcttcgttgtaatgggtatcatacgacgttttaagcgtcatgcccggaagccctgcaatgtgcatgaatttagaattggtgcaaggttttcctacttcaccgttaatcatcaacactgcattagttttacgtgcttttctcatttgaatttcaccccgatttgcgatacgttccattcttttacttcatcaacaatatcataatggttgatgtatggtaaagcaatttttaaattactcgcgtcttgaatgttgcgtaagaaacgagtaggagaaagaagacacaaccgctcggatccgttgtttcctttagcggcaaatgatagggtttctcccccgtcaatcttcatatcaacagaaatcgttttgaattctggtgcgtatgacgtgattttgccgttgtctctcggcgtactatagaaacatacactttgtgggacattataacgatctgtttcaatgtacatgtaatcgccgtcagtcattccccacgcggtataaagggatccggtatagtcaccaaaggaatttttaaaatcttccttcgtggtatatcccagcgagcgcaattgcataagctggctatgctgttcgattgcgtcggctttttgttgttcctgtacttgcgcatcaatcgtttcttgccaggaattatacgcatagtaacccacaacagcgattacagccataacccctacagctttccagattttagcgtcttcgtttttgttactcatgctatattccttttaagaaaaagggccgaagcccctttgttaacgaagataaaccacataaccgctttggtcaatcgcgcggtctgcgtcattgaagatattaccacgaatgccttttgctggtgctttccagcttgcaggtttcaggatattaccatcattatcgatgaaagcggcaacagaacgctgattgaacatttcaccagtttctttgttgcgagtatcctgaacaacgcgatgatatttgcggcctttctccagaaagaaaacagtttcgaaaggagaatcttggaaacgagcgttacgcgctttgtacattgcttccatgaaaggggctgctttttctgcgaggatttcgaaagtgttcatggtatatctcctaaagtgtgtttcgtttcgatgtaagtactatatcaaagatggttattctatgcaaggcttttttcgttatccatcaaatattttaagtgttcttttaatgcagggagttcgttcaaatggcgttgcttaactttctcgtactctttgcgttcccagttttcaagattgcttgccagcgcttcatcacaataagcgatcccgcgttctgcatcctgaactttctgtttccattgtgcaactgcttgttgataaagagaaccgttaaccatcataataatttcctcccttgtttcgatggggtaactataccaaagctaccccagaatgttttaacaaaaagtgctattagtaggtatccagtttatacattttgcaccagttcatgaattcttcgaaagtctgagtattaacacgtttttccttcttcactttcttagtgattacaggacggttagtaaaacgtttttgcattttcacagtgattgctactttatcgcccaggtcttctaccttttcaaccagcgcccactgagaaccaatttcagcaccgaaagttaaaccaacaatctcacctgctttaacgtgtgctgcatattttactttaaccattttcgtattcctttctctgtttcgtttcgatgaatacaagataccaaaaagcctcccgcaatgcaagaggcttctttaacaaaaagtgctattttatttctttgagcaatttacggatcccgccgccctgtgtcttatcaaagattttctttgcatcaataacagaagtgattatgtggtagttgttcccttttccgtcaaactcaaactcgaccttgtagtcactacgaaatttcacaaaaacaaattcacctgcaaagtgcttacggaaatgtttttcgttaatgtccaaccattcctgtgtatcatctaactgatacatgcgacaaaacaggatcgaacccattacaacaaccacgacaaggatagctaacgcgaattctgacatcatttacccctgtttactgattgacggtgcaatgatttaggcacaaccggatttcggtatggtttgactttatggatcgtgggttcttccccaaccaaattaggaaattggttgttccattccatcgaaaatggatagggcgatgactttaactcttcgatcatacagtttactaaacggtcgccgattacacccaaagccgccccaataatcgctatacgcataaatcaccccttaattgtgtcaagtacagtaaaccagtcatgaagccatatcgttgttcttacagcgatatacgttaacaaactaatcaatgataccgctccgcaaaaagccagcgtaatcaacaaccggatttcaaatttagtgaaattcatatcaatctcctttctgagaacccaatataacaaaagccctcaaccgaagtcaagggctttgttttaaatttttaccagttttggcaatcgaagaactataccaggatggatcagacgtgcatccggaatagaatcacggttgattttggcgatatcaggccaaagttcaccaacaccatacagtttctttgctatagaatataggctatcacctggttgcacgacatagcgatcagattcaatcttaaccagatcctggttaatgatatcatcaaaggcttttgctttcgcttcgttaatcgagttcccgtagtaatggcgacccataatagttaatgtgatcatcgtttctttcctatgctgttttcgtctgtctcttctaaggatggaggttcttccagccccagagcataacgtttagcatagattagcatcaatgcatctttagcgcaatcatgaatcgaatcatgctgaatgaatccatctaacatgcctttacgcagtggacacgtggtcactccgcgagtcagtaaacggttttcaatagctgtacgcacatcacggctattccagaacacggtcggcatatcttcgaacgtgtcaagtttccctgtcatagttcgtacaacatcggttagcatagaacgatcgaattcagggccgcgagtataatcgtatgactgccaacgactcacaccgtcagccgctaaatcagcaaagaattgtcgatgaccttcgtacaaatccatgtcaatatcggaagggaacaaaaccctttgtgcttctttagattgctgtttccaccattcgatcgttttttcatctttgatgcgttctggttgtttccggatgtcaaatttgtactttcttcctttagcaatcagttcctgaaaggtaggcggatcataaggatcatcaacaaacggaacatagctaagttcagctagttttccttttggaaacgggccaatactttcataatcaaatacgaaatctacgggtaaatgactcattcgcgaccccgcttatacgattccatgaaataggccaatgatagcgcgacttccggagtaacatcaacggattcgatcatgcctggagttactgccatcatcccgaactgacgaagcccacaacgagcaatcgatttttccagtcggatcatgttttctacagcctctgtaaaattgtccagatgttcccaatcgtggtaatcttccattgtagaacgatcacttttcaaaatcagatcggcaaccaattcagcataaaggcgcggaaggtgaatattcatttaaaatccctcaagcatgtttttgttttcacgaatgttacgacccattttcaaagtatcaatgatcactgcatactcttcaaaagtgaattcgatatcttgtgaaatgtttccccacgtgtaggtcggcccgttaggacagtataacccaacttctttgtttgcgttgacaacgcagcgcaattttgcaaacaacaaattgatatcgatagaattgaacccttcgagataatcaagcccctctctaccaatacggtcaacttctcgcaaaatcttttctacatctttgactttaacaataattttcataataacctcaaagggccgaagcccttagacataatcaacagtgaatcgtgcgcgggtagttcctacataaagcaactgcttacacaattcataatcggcgtatgcgtatgcatcgcgcgtatacatgtatgaatgatcatacgtgcttccctgacctttgtgatacgtacaaaccggaagcgccttaaccgtctggaacttgtttttgatttgccagaacgaataccagggggctttgtatccggtttcctgtttcatcttcttatactgaaacgcgacgtagttcaaataatcgcctaaacgttcctgcataaccggatccgcgataacctgaatatccgctttcgtatcctcgaacatcgattctgttttcatcaagaaataatcgatttgcaccggatcgcatcggtcagctttgatagtatcagaacgcggtatgatttcaagaattttaatttgctcgttgttgttatagataacttcaacaaacgaaaccccattcacacggccttctgtcactaacggttcttgcatcacaaccacttcaccaacaatgaacggctgatcagttttgtacaagtgtttacggatcactgtgtttaacttgtctacgtttgcgttagtgtaagcaaacatacgattattgttcaggtcatccggagtcttaacacggctaaaataacgtctcaggaagtcaccagcgttttcgtgcttcattacccctagttcaccattcatgaggggcattaacggcttaccgtcgcgtatagcgcgtgatacctggatgattgggtttccttctgcctgacgcataatcttatccatgcgaatgacatcaaaaatttcctcatcaaagaacggtgaaagctcggtgatcccttcggtattaacaggacggatctgatccttatcacccaatcccaggatcaccgcacaactcggaatagtacgcttgatgatacggaatagttctttgtcaaccatcgatacttcttcaaccacaaacacacgacattcagacagatcagcggcctttttgcctttttgctgttcaaatactcgtaactcttcgttggttacggggctgattttcagtgctgagtgaatggtcgttgcatccatacctaccgcctcagagagaacgtttttagcctggtgtgtcggcgctgtcagccagatcccactaatacccagttttttcaatgtttcaaacacaaattttaccagagtagttttaccaacacccggcccacctgtgatagtagtatggattttgtttctgatatttttaatcactcgatcatgtgcatttttctggtcttcgctcagatcgtcaaaagttaattcgctcatactttaatcaataccccttgaatacttgcgtgttcaataaaccaacgcatatctttctttttcttttcggttacggtttcaacttcttcctttcgaaagaatcggctaagaccactttgtttaactggattcatcttatcatgatattctttgataatcgaatttttatactcgttagcatcgtccggagatagaaacaacaaaggtgttaactctccttccttaatgaagggaattttaaacccgtctttatccttactaacgacgatataatattttgtaatcattctcgcccctcataacaaacgtagaatattccaacaaaccaaaacactgatagtataatcagtaaaagttttctttcaacgccatttacgtgaaacacacaccaaccgaaaagatatgtgatcatcgcgcaaacaccataagaaagaaccccaacagctactagcatcaaaaagtgccattgatcgataccataaatataataaaggagattatacatgatatcgaccgtaaacacaatagttgttcatgctcattatacaacaacccccgtatttgaaggagatatctacacattcaaatacacttttcctatcgaacagatagttcaactaatgaaaaatagacatcctatcggatggatcaccccagcaacaaaacaactactaaggaacactatcaatggactaccgtaaaatttacaccaatcttatagaaaaagcaagaggaagaacactagattgttatacagaaaagcatcatatcattccccgatgtatgggaggtagtgacgaacatgacaatttagtagaacttaccgcagaagaacattatgtagcccatcaacttcttgtcaagatgtatccgcacgataataaattgatatatgctgccaatatgatgtgcgtcaatgcaacacagagaaataataaagcatatggatggatccgtagaaagtgggtatctcagttgtcaaaagacagaacagggacaaaggcaacagaagaacaacgcaaaaagatgtcagaatcccataagggagacaaaaactctatgtatgggttacgcggtaataatcatcctgcttatggtcaaaaaccctggagaaatcaaataacaatgaaaggaaagcatgaatggcggtatgctgggattttctatgactggtatattaacgatattaaagctggaatttataaaagacaaggacacaagagaatgctacaagaattgcaaattgcaacaatctcccgtgttcctagaacatcaatcgagctattcaaaaagggatggaacccttacgaagataccgattggcttgagtgggctaataatcaatagctgttggcccaacgacgaagattttcagcttgtttaagagcgtacagtttgtagatggtttccgcatccatacctaatgcaataaacttacatagtacaaagtggaattggtcgatcatttcaaacagaacttctaaacgatcctcttcactcagatccgcaaatttagtattgcgcaattcctggtgatttgctttccacggtttccaaacaccggacgcaggtttaacaccgcgagacattccacccagagcggtatacaattcgcgggtttcatcggcgatcgcgtcatcttgcagtttcagccaatcaaggatttctccgcaagtttccagattatccggacgcggaacccaatgcagggtatcagacaggctttgttgtgcatggttttgtaaatccagcatggattgtaaaggatcgccattacgggccagaaccttttgatattcggaatctacaaattccagatcttccgggttaaccaggtgcgcacatgaattaaatacaggagttttatcagtagtcatatcaatctcattttttcggtgatttgtcccacgacttaaatcgaagttttgccgtgagtccagaaacagtattatctttcaaatactgcataatttcaagtttagttgcgccgtccgtttttatcatttcgttgatatctttggaaggccacgggcatttgtcccacattacaaccttttctccagcctcaatcaatttaaagaggcggtgagtagtatccggatgacgtgcttcattgtcaagaacccagacacgcatatttttatacggaacctcagaaagtgcaagctgtccaccagtgatagcgccagcattatcaacaaacaggctatctaatggcccctcaagaagataaaccgtttttagcggatctatcgtatcctgtccgtaaatcttagttgattcctcacaggctttgattgtgatatatttcgacttagcaccatcacgtaaagcacggccctggaaagattcaattttacctttcttatcgaagatagggatcactaatctcggttctggttttgcaatcggataggtatccggattcacagtattaaccagttgttgccattcgcgagtaaaccacaaccgatcccacttgtcacgggggatacaacgattctgcacatattttatgatcggatgttcatccggcaaggtatctaacctttcgcagaattgaagagtaggaataaatttcttctcttccttcggttgttctgtatgcgttggctttaacgaattgcgatccttaaacgattccatgagataatcacggtaatcgtctggataatattctttcaggaatacgctaaacggtacaccataaccacagttaaaacaaccacaattcatatgatcaccctttttagaagggtagatccaaaatctttttttgtacttgtctttcattgagtcgccgcaaataggacaacgcgcattgatgcttaatgcccccgatttacgaacgatttcgctttgaggcagtgatcccatgattcgggttgcaaattctatatcaagatacatttcttacctcagttgactatctttagatcctcgtcgattataccccgcgctgatcatttcgtcatgttctttttggcattcaatacaataacggcaacccttcacgatagccctacgtttttcgggtatcggatccccacaatcaaaacaatgcgttaatgattctccgtttctgatttgagaacgtgcaaaatctatcgcattgtctattgttgcctggatggtatcttgaacaccgtcagcagggccaaatccaaccgccattgtaaatcctcctaatcaaatgatttcaatatcatagactaagaggatttttctgtcaagaacttacttgcttttctgttccgtcaagcattaacttccaaccacgaaatgcctgtttaaacgaataatttattgcaatatcaattttatcagaaccttttcgacgattctgataaacggtcgcgttgtcactcatatacatgatacaaattggaaaccatgtataatcgttagcagtagcccagatagtgatattcagcggaggaattatcatttctttttccttttccctgcacgggtaacgcctaatactttcggcccgatgttggttactgctccagtagtcacaccagaagcaatcttttctgtatcgccgccagaatcacccgcgaccatatcctctaacatgcgccccttatcataatattctttgaggcgtggaacgttcaacatgatttcttcatgctcttgttctgtcagattgtagcgattgcgtagggtatcatatgaactggttaagttcataaacccactcatatacggaacagcattcattctacgcttgatatggcgtactgaacgatgaaaaggagaatacgcttctaactcttcttttgttttggggttgcgaattacttcgccttgtccatcaaggatccccagcttgtaagcagtccattcagtccagggctttttgagtagccggatcatccggacgctatatgttaaatccatatttttaactaattgatcactcatgattattactctattgtgaaagtgaataaatcagatttggtttcaggttcaaactccatacaaacaacctcgcatagtggtttaacccctttccaatcctccaggtaatacccagtatctataccgcatccaggattcataacgaggccagtttcatcaagaaactttttgcatttacttgatgtggtgctgtcatcttgtcggaaacagtgtgttttcgaataccggaaatttgcagacatttgagggattatgaaagttccctgacgcgcgatctgtgatgcacgttcgattactttatactcaaattctgcccctgtatacttacccttaaaatcagatgttttgattttaccaaaaggcggattactgatcgccatatcaaacacctgattaaattcagttgttaaggcgtctccatgcacccaggaggcttctggtacgatacgcttacctaactcatagtatgtgtgatttaactcaacacagacgatttcacgcggcgtattgtacatcatgtaatgaaccatagcgaaagataacccaccgataccagcacacaggtcaataacacttccacctgtgcaagcatcgattgtgaaatcgcgagcaagtccaataggggtaaagaacgcccctaattcagaattgtttgtaaacgcgccttcatgaaagttttcaataatgaacaacttctcttcgtaagttagcgctttgtcagagtgaaccagatccattatctgattgtgtttcttggtttccgctttcgttaactttgccattttcccagctatacaataatgttgattcgttagggtagaattcccatccgtctacatatccggtttcccagtcagtagtttgttcaaaaccacagatccattcatatacaccaggaggcatttcgacagaatcaggaagcccgatatcttccgcgctgcgtccacattcaaagaatgcatcatgaatgaatggtcgagataataccgtaacataaccttcatcgtcaacagctacgatccagcgcgaactgtgaggactatcgaacttcggttcttcttcgtctgcgtcagcttgcatttctgccttacaaaaatctaaatttatcatttcaaaccctctttaacaccctctttcatggctttccaggtagaacctgcttcaccattcagggcggcgaatacaaatagtaagatagcaaggacaagattcacaccagcaatcaccatgattttgctatacacgaaaatgtaaggcattgccaccacccaccaactaaaagaattaccagttacgatgttgagtgctgcaagtaagaaagtgataacgaatgcgattttcataatgtcctcctttgttatgattaaggtatcatcttttgcgaaagaatgcaatacctacagatacaaaaagcccctttcggggcttaatttttatgcgttattgatgagataccgaagaacgtttttcgcttgttcctcattacaaccaactttgaaaccaggttcgatagggaggaagttccagaggaaatcaacacttccttcaacgtcatctttgcctttttccagcatcgctaacagtaaacctttgtttttgatgctgtttacgattgcgtcaaaataaccatcgctgaaatcaacattcgggttcagcatttcgttgtaagggttgttgaatacgttcattttgaatctcctttgtttaactcagtatcttgtctacgtgagttatattaccacaatggagattcaggtcaatacctttttacgattttttgaaaaatttttcgtatttggcttttacccagcgatacatatcttcggccttgtcactggcaatcagtgagaacagcagatagatcgcaacacccaccaacacaacgcctactacaatgtagacgggtgatagaactgggaagagaacccagaaccatgacatatgcgagaagccaaatactttagccgctgcaaaaatcagtgtcagtccagtcagaagtttgatagccggaatcggaatcgttatagtcttagtcatttcattaccttacattctttatggggctattcgccccagtcaattaaaattgaatgtcagattttgcaatctgtgccattttttcacgtcgggtagattcagcctgtttaatcatcgggccttgtgtctgttctactgttttaggcatagtgttgccgtggtagtcagatttaaacccgtattcgctgttgtcggtatccatccagcgctgattaccttttcgaacttccaacttgaacttgttgaaagtgttcttatcgccataacgggatttgatttgcttgaacagttgcataccctgatcagctaactcttccgtctcgattacagctaacataaaatcagccgtagcaggtaaaccagcggattccgcaacatcacccatactcacatccgaactatcccatgcagaacgcccaacctgtgcgcctgtccacattacggtattagtttcaacagcaagaccgcgtagttcttcggcaattgctttaaccagaatataggtattttcagcacctttaacgcgggttgaagtacagatccccaggtaatcgacaatgatcacatccggcacaaactgtttcttcaatttaagctctttcacaagcgctctaaagtggtttgcacctgcacccgatgtagggtactgcttgaccaccaaacgcccaaccttacccgctttaaggcgctccattttgttcttatagtctgcgtatgtaatgttcccttcgtcgatgtcatccatagtcacatcaagaaggttagcatcgatacgcttagagcaaacatgctctgccatttccatagaaatgtaaagaacgtttttaccctgttgcagataatcagccgcaagagaacataagcccagtgatttaccaacgttaacaccagccatgatgatattcagtgtaccacgttccgcgccgcctttggtgattgcgttcaggatcgggataccaaacggaattttcatcgccttcgattggtaaagcatccaccgtttttcataatcttcgaaatagtcatgacctactgaactatcgaatgaaattgctaatgcttcctccatgatttcagggatagccccaacaccaggaagtttcttgttctgttctgccagtggtttttctgcgttagcctggatctcgattgcgcgagaaagagcacgatacattgctttgtctttgcaatatgtttccgtttccttcattagccaatctaaatcttctggcgcatttttcagcgactgaatcgcctttttcgtgtcttcgtagactacatcacttagatttcgtttgtcaagcgcaacctctaaagcagtttttgacggaataccgttgaattcctgtacatgtttatcaatgaggtcaaacaaaacttgtgcattgccttcaaaatattcctttttcagatgaggccatgcttggacaaaatacgtcccgttataaatcaggttagaaaatattgtatcaacgatcattgtattgccttataccaggttgctgaacatcatgaaaaagttgtaaaccttttgtttgaatacatcccataatgtcagcttaggctttgggacaactgaacccttttcaagctctttaatctgtgcataaattgcatcatgcaccagcgggatcaacgcttctttgtcttcgtctggggtactgaattctactttcagaccatgatcccaaaacaccttatgaatataaaccagatgcgcaacacctttttcatcgttaatcagaagttcctgaataacatctttcatcgcttcatcaatataattctttgctttgctctcgatatccatacattgcctcggttatggggccgaagccccatagtttttataaaatttcgttgtcttcttcgatatcatcaaatgattctgggatatcgtcatcatccagatcaggatctgggatgctatcagtgctgtataaatcttccagcgcggaaccatcactgatttcacgatcagggatcttatacttttcttcgatagctttcaagaatggttgatgagtaaacagaggacgccagaattcaacgctatttgtttctgactcacgccatttcttttcttcaacttcgagttcgccagtctcggtattcaggaaagcacggttgcgccagcctttggttacggtctgtacaaagttcatttccattgccagatccagaaggccagaatacatactaataccgccttcataggtaacatgcagcgggaattttgatttctctttcacgaatcgagatttttcgatgttcatgatgaaatcataacccactacctcagtaccttctttcacctgttgtttacccaggatgatcgcagtatcagcggaatacattaaaccagtaccaccggaaataactttcttgctgtacatttcttgtgtgtcataggtatgacagatacaaaccatcgggatatccaggtcagccagataaggcgtaaccatacggaacataccttttaatgcttttgctcgcgtcatatcctgtttatcgttatcagacagcgcgtcagcaagttcttttttacttgccgtgttgcctactgagtcaacgaatacaatcaccttatcaccgcgttcaagcgcgttaagctggcttacaacgtcattacgcaactgctcgaccgtcgtgatacgagtatacacaacacgatccggatcaacacccattgatttcagataggatttagtaacacctttttctgaatcgtagaacaggcacacagcatcttcatacgttttgagataagccgctacagtcagcaaacctaagttggatttgaagtgtttggacgggccagcgaaaagggtaagaccagaagttaggccaccgttaaacgcaccggacaacgccagattcagaatcggcacacgggttcgcgtgatggtaatattgttgaatacgtcgctttcagaaagtacagatgcagtttggctattcgagtttttgatcagtttttttagtagtgctttgtttgacatttaatttttccgatttattcattctcattctatatatctcactagttaatgaaaggggccgaagcccctagagtttaccagtcaccgaacaggtcgtttaaactggcacgtttttcataatcaattttacatacttccgtgatattagtcaatggactaataacatgtttttcaaacatacccggataatctacccatgccagaatatcactttcgatctctgacggtagtttatttccggattgccacgcgatgcaatcggcttgccacgggtttttatcccttagtggtagaaccattaccttttcaccttccatgattggcgtaacaccatcaataccagcagtgaaacggttaaagaacagcacccctttaatatggtttggtgttcccttgattggatagccagccccatcacgatatttcgaaatgttgttagcagatgatacaccagcaatttccctgtagtcaagttccttatattcttcttcgaactttttataatgttcgtgcaaagataattcaccttcttgcaggatacggcggatcgcttctttcaggaatactttcacagaggtcggagtactcgatcgctgtgtttccatacccatgattttcagtttcggtttttcatagcgggttccttcggagtcccacacgttagccgcatatcgttttttagcagtccagaaacttcccaacccttcggaacccaacggaggcccagaaatgatttcacgatccataaacatcaggtgttccacgttgttcatgtattcgcaaagttcacgataccctttatcgatcatcggttccattctttctttagcaaagcgatccaggaagtcaacccaatggttattatccttaaatttagcctcaccaccaacttttgcaatcacgttatccatgcaaacataaatggagtcagtgtcacagtaccgaacatatgcatgatccgtagtaccgcacaggtcgttaaggtattcgtttaccttacgttcaatccactggatagccaactgcccgaacatggtgatcgcgctggcgtttcgtagatcgaagtatcggaagtgttcattacccaacgcaccataaagggagttgatagaaatcttacggttaagctgtgcggtgttagcttgtgcgatcttcttctcacacacgcgcttaactgctttaagcatttgttttgtaagagttttcagaactgctttcgattcatcactgaaatctgtatagaaatcaaagtcaggatcaaccatttggttatgcgcgtctgttaagtgttcgagttcgtgcttgatgagttcaagatttcgctcacccgccatcattcgttttttccacatcttacgctgatcaaatactttcttgatctctactgggatcacgcctttgatatcacggcggaacatccacccgttaggagaacagctaaattcatcgctagggcgcggcgcggtcttattaatatactcttcaagagcacgtaccgcaaaacttcccataatcgtttcagggctgatattcacctgtcggatgatggaagggtacaggcttgttaagtcaaacgataccatgtatttgtaaggcccaggaactggatccttcacaaatgccccagggtaaggggttttagtatggcgtctgttttccggaataacaaccttatcttcacgcagagagttataaatgatcgcgtcccacgttttcagcggagacataacccctgggaagttaatttttgcatagtacgctacagacagaaccagttcaataaagtttcgtttaccgtcgatatcaagtacgcggataacgtcaacaatgttgtacgtgatgtacagttggtgatcgcgctggcgtagttcagacagggaaccttcatactcaactttatttttaccagtttcgtattccgcgatcgcgtccagacggtaagacggttgcggggtaaagctgaatttcttatacagcgccataccatccatttgagcaacgccgaaaatatcatatcctaattgttcgttgccgtaagcgtcagtagtggttctggcggttactttaccaaacgggctaaaatgccttaccacgttttgaccgaaaatgttcaggtatcgcgtgatgatatatgcaatatcgaatttgtcagagttccatccggttacaataacaggggttcgctctttccaatctttgatatacgcagacaataacgacttctcggtctggaaagaccgataaacaattttgtttaaatcttcttcgctaatgtctttgcgatcaacgttttccgcgcaccattccgcaaggccaccctcaaccagatcgtatacatagaatttatcttcaatgctatcgtaatgggtgatcgcatcgattggatattttgcttcacgcggatccggaaattctggagcggtcacctcgatatcgatagaagcaatgcgaatgtgttcgcggttgtattcgatttcattccggtacatgtcagaaatgtaagccagtcggtaatcgtccatacctagcgcttccatcccaacatcgcgcatacgctgcatccagtttttagcttctttgatgctgtcaaactgttttttgaggcaaggcttgccgtaaatgtctttgtatggggtttctacgccattcatagcgtgttgatacattacgggcgcatatttcgtcttacgtacctgttcggtgccgttagagtcaacgaagcgctcgtaaatggtatctcccatttgttcaactgataggtaaaattcattcattggatcttgtcttctccattaatataatgttccattgtaacactacctacagcaaattcaagtttactcgatgttctaaaaccaacaacccttctgctaacaagtcacggatctttctcagttgaacaagctggcgttcaagtttaaacccgtcgaataacatgctaaaaatactggaatttatactatgatattttgcttctgcaattccctggttaaccatcatgatagctttgttaaccagtagtttcctttccgttactgtatgttcatccagttgacaggttgcaagggaaaccagatcatcataagcacgttggtcaataacgttatccatacgggccgcgaaaattttattcatgtaagtgcggatcattgcgcgtcctccattcttttcataaagacttcttttgcttgttggatcaattccagagattttttaatacgctcatagaaatgagtggtttcaacttgattgcataacaatgtgtactctgaaatgttacgatcgtaaaatccaggaaagtagtgttgtgcatagctgtaagtgcgggtatctgacagattgcaagttaacgataacaagatgtcatcttttacaatcgggatgatcaaagtttcgttggatttgattgaatccatgatttcgttaatagtcataatatatccctctcaatggtgtacacccaatataacaaagcccctgcacgaatgcaagggctttttgattagtgaccgatccggtacttgtacttgaggatccaatctgctttttgcgagtgagtcagtacgcggaagttgttttcttctgcaaacttcaacccaggggttacgatcttaaccatgccccactcttcgagaagtcgcgcaatgttgttccggcgtagttcgtcttcttccgtcatatcgacttgacgaccatcgagtttcaacagttctttaaaatgcacgataaaatacttaccttgctttttcagaatgtggcacgattgccagagcattttctttttgttgtttgcaataccaatacgggttagcgtttcacggatctttaaaaaagaatcgtcgctgattagttgaatttctaacatacatcaccattgtttaatcaatttttccaatttcttttgttcagctttgtttttcacaatacccaacaaagacagagcgacctttgcgtgttttcttttccaatcctcgaacattccgaggtctttaagttcctgcaaatattccatcgctgtacgtgtatttacactgtatttttcgcgaaggatttcgataataattttctcttcaaaatcttccgatagtttagcccatgcaccgaagcgtttagccttcctaacagagttgagataatagttatagtgcatttggtcagagatactaccgcctaccagattcatcacatacgcgttgtatatcgtgtctatgtgctggctcattgcgttgtctacaaagtacttatcatacacttcatcgataaccaacggcgttttgccgttgttgatttcgtctatgatgttaaacaaggtgttttctttatccttgccgtactctttgaccagttcttcaaccttatcccaatctttagaaagccaagcggattcatgcggggataactcttcttcatccagaaattccgccaggctcatgattacgcctcccagaccatagaaagcatcaggttcatcaacagatattgcagatgaatttctttattcatcgccagcccgtattgcgcgttgttttcgcctacaatctgaatcagtgcgattttagaatcctgattcacgataggataaatcgtatcagtcaattttccgataaaggtatcgtattctgacgcatatttaataacctcagagcgcaaccctttatagttcttttctttcaacagggtaatgatatgagacacatcagaaccaacgatctcatttaggatccccgcatcaatttcaccacgtttcgagtagaacccaatcgctttgataatagaacgcgcatccggataatgctctttaacaaacgctgcaatgactttaggatcatacttgatattctcgatttcaaggataccgaaacaacgcttgattaactgtttcatcagttcgatacgttcagcatcagacggaacaccgaatttaacaggaggacaacgagaaagcagagcactatgcacaccgttaatgttgttcgctgttacaataacagaaacgtttttactgtatgcttcgataaagctacgcaagtgtttctgtgcttccgccataccagaacgatcgaattcatcaatgatgataatctttccgcctggtttctgcgtcattgatgaagcaaaacgatccagttcattacgaatgaagtttacaccacagttcgaaccgttgacaaagaacacctcagcatcaacctcacgggccaacacaagcgcgagggtcgttttaccagtgccaggggaatcagatacaagggtcatgttctcaacacgcccagatttgattatgccccgcatagcggctttgtcaccagaaggtaaaatacactcttcaatcgttgttgggcgatagcgctgatcccatgcaaattcatcaggagatcgagagattttaccgtatttggtttcgatgatttcaatattttcactaagttccataatataccttcaaaataaatggtgtaaaagaaaggggccgtagccccttaaaactatcttacttgaatgtgctacttgcttcaagtacgacgacgtaagcaacgccgttatcagaagagaattttgcggcccctttggaggaaatctctactttgtaatcgctgttgatgaactgcatgttatcaatcttcatatcaaaattgaaaacattgtcgccttcatactcaccgacttcaacggagaaagttgattgactttctttgcttttcgcggtgatgaccagtttaccatcaatcggttcaacggacaggtcggtcagtttcatcatgcgagacgctttgatcagtttttcgaaatcgttagaggtaatctggaaaatcagatctgctactggcatcaccagacgttttttcggtttcgggatcgttgttgcgtctgctgaacgttcgatgatcttcatcttgtcgccgcgaatcacgatttcaccagttgaaatatcatgagtgatttccgcgtcagtgccgacgatgttcagcatgttcaggaatgagttgagatcgtagataccaacatcttcatcaatcacatcagcaatttcagcttctgcgtatacaacgctgttgattgatttcgtcatgatgaatgaacctttggtcagcatgatcgaagagttgatttgagaaaagtttttcaggatatcaatagtttgtttagagaatttcatattcagcctttagttttcaataagtgttacttaataagtgattttacaacggtttccgctgctgtgtcaagcatatcagccatttctttaacggttgtacgcttcggatcttcgcgtcgttcgctggtaagtttacgatgttccgcaaccactttttcatcaatgtcacgatagtgtttaaaacgttcctcttgaggcatagccttaaacagttcttttgtttcgtccgagagtttagcaacccaggatttacggacgcggttcatgtagtcaacaaaaacattactttcattcatatatttcttctctaacttagaattctttgagtgggggccgaagcccccgcttgtattacatgtctaacagtttatccaggtcgtcatcaccggaggtatcagaatcatccaggtcgaacggtacgccgtcatcttcgcctaccggaaccgatgcaacaccaccagatgatttcacatcagatgtctgattgtcaaacttagccatttcgttatcgaagttgctcagttcgctatcaaggtcagcggaagcgctggaaccagcagaaccgatcgaactacccataactttattgaagcgagtggtcaggtcagccagcggtttaaattcgctttcagcggtaatcgggcggagatcgctcataccttcgaaaattgctttctgaacttcttcatcgtcgatgtttttgatcttagccggaacaccaaacgagctatcgtcatagttaggccaatcaccaacttttttcgctttcagggtgaagttagcaccatcaaacggacaggttacagcaatacccggttcatcaagttctggattaccgttaattgcggcggtgatcttgtccatgattttcttaccgaagcggtatttgaacaccttaccttcgttttctggagcgcctgggtctttaacgaccaggacgttagcccagaaactttgtttacgaccgatctggctcagtagcttatcttctggcccgtttttgttggctttagccttctcatacagatcgttttcggaaatgtacttacatgcaggacagccgtcataatcgccgtgggtagaggaacagttctcaatgtaccactggttgtttttcttgaaagagtggctcacgatacggacgaacgccagttcatcatcggaacgtgctgggaggaatcgaataacggcggaaccgtttttctgtgcgtccagggtcagtttccattctttctcatctttctggaagccggaaccacctttcagatttgctacctgtgcctggagtttagcgggatcttgacgtttaaaaatgctgctcatattctgttttctcgtttagtttagtttgattaacgtttgtttcattaagtttcgatattttatgatatctttttcagtaaggtcaaatatttttctgtatgcctttaacttaatgctaaagtcagaccaaataatatcatcagctacttgatcgtgtttatttatgatacctaaaaatgagtcaaaaatcaaaaacgattcgtaagatatcacatttgacaggacaagtttgcttatgtaggacgttgatgatttttcgctgtacttgaacaccagagacacggggatctctttcattttggcgaattcgtacacgtttttaacgtcatccacaaacacgttatctagtctttgtaactttcctatgtactgcctgtaaaagacaatactatcttcatcaacatcgcctacccagaaatccggattggctacgaagttggagaggaatataaaatagatttctttgaatgtaaagcgttgagctaattttacaaagaaatatctatcctttcgcttgttaaaggcgttttcactaactttgatctgccagttgtattgaaggacatcaaaacgcccctggaaatgagttttcatcgccagatataacttgtatacagacaaaggcacaagccgtgaattcgcctcgctatcagcaaacggagctttgaatctcacatgaagccgtccagagtggttgatgaactatgttcaagcgcaaccgatgggcgaagcatgtttcctttgatcgcttcgtcgctaatcttatcaaggatcgcgcgaggaaccgttttattcagcatcgcataatcaatagaattttcatccatccattgtagcgttgcttccatgtaggttgccccctcagaggcaaccagattttcgatatacaaaccgacttcggtcttatttccgatcatgctttacgccttatcgatcatatcatacagttcgatcagttcgttgttttcttcttcgaaagcggtacgggcctgttcgtgatacagtttgaacagtttcccgaaggtttttccatcgataccgaaatcagtttttgctttggatttgatatccttgaacgtaccgttgaagatctcaacttgagttttcacgttggatgcttctttgatcagttcttttacctgttttgctacatcagggtttgtttgtaaaaattctacactcattttgttacctcaaaaatcactcagtttttcgaacatacgggaaagtttgttatccatgaagtaacgttccattttggctttacttccggattttggagtattatacgcttcaataatcgaattttcaatatcttttggtataaattcgaaatcgcgtagttcctcattttctttgtaacgtgcggcccattcaggggtcatcaatgttgtcggatcgtctgcctccagccatgcctctaactcagaggattttaccgctggggcgcgttcaccttcaaccttcgtcacaatataatcatttctaattttaatgcaagcgatactatcttttttatcgcctttgatatttttgtatcgcagatcgttacgtggcgaaccgtacttaggcgttacccatttttctggggaggcgaccactgacgaacaccgttatatttctgtagttgtgtaaagtcgctatcagcagaaaccactaatactcgtctaccttcaccaacagcttttttcgtaacaacagcaattatatcatcagcttccgcgaattcaacctttaatccgagataaggcatattctgacggatttcttcgaacacaggattaaggaagttgttcagacgatcccaatcccattctgattcttcgtgttcgatctgacgacgttttttgtagtaccaggctttttgcctacgccagtaatttctgtcatcgaaggcaatcacgatttctggatactcacctttaaattttacaacgttaaaccgtaaagtgtcaagcaccagatgacgaatcatttcgatcgtgatggatgcttgttcctttggtttgaagttgttcatcagtgtagcgatggaaatgttagagatatcgatgaccatagtatcatcgggttccccttcatcttgcatcagcttgttcaagttaaacatgcttgcaaaactgctcatacatacctcaatttttcaaagaacggggttattgtagtaacttacgaaatgaagtcaatacaaaagaccataaaaattttgatcaataatacttgatctgatcaaatttatgatctataatttattaattaataattattttactacaatgatcattgtaggtcaagtactaaaatcaataaattttatataatttagatctgatctatagatcattagatctactttaaccttaaataatatagaatgaaatttgattttgtctacagttattatataatattcttaacttcaaagaggaaatatgaatactatgactaaagaaacaaccaatatctacgcagacaatgaaaaattataccctatcctctgtgcatggaaaaagcaaatcgccgaaacaggtgatcgcaaaatgcctaatgagttgggggctgctattatggatattgcaaacgggctatcacgtcgttacaacttcaaccgttattccgaagattggaaaatggatatgatcgatgacggaatttccgctgcaatctcaggactgcataacttcgatgaaactcgttataccaacgtttacggttacattaacaaagcatgttggcaagcattcgtaacacgtattctgtacgagaaaaaagagaacgcgaagaaatataaattcttccttgagcacgtttacgactgtgaagattcagatatggttagtattgcagacgaaggtttcattcaagatctacatgacaaactatctcagtacgaggcttccgccaccaaaaccaaagacaaggaagcggaagtattcccaacattggaagattttctatgaaagcaataattgacttaaacaaaatattaactgatatcgattacgaaattgacttgctaccctacttcgtaaaattagagttgcaaaacgtgggaatcccggttatcatcgatccaactgacgtaagaaaccccgatttcgaagtagaagaaggggttttgtcttatatgataaacgccgaaactatgatcatggagatcacttatgattgatgaagagaaagaagtactaaccagtgtggaagaagtggatccagaagaggaaattcaacaaaagatccaggaacgtgtagaagccgacgcattgaagcgagcacaaaaattcattaagaagaaccggactgagatcaaacgcctccgtagacacgcagaggaagccctattcaggggtaataaggttcagtatgtgtatgcggttaagaaacttcgtgatatgctcaaacagccgtatacagaggatttcattgatacgatgtggaacacttcactagcatcaattcgaaatatcgtagcttcacaacagaagcactaacaaacaagtagccccgaaaggggctatgagggtcttatgagaaagtacttaatgatcggggatactcacgctggcttgcgtcaggacaacccctggaatgaagaaaacctatacaatgtattcgtacaaatcgtagaacactgcaaagcaaacggcattaccgaggctttccatgctggtgatttctttgatgtgcgcaaggccaccacacaaaccacgatgaaattcattcgtgaacgtattgtgccactactggaagaagccggattacatatctatgttctggttgggaaccacgattgccagtttaaagacaagatccgccctaactcaccgcgagagattcttgatcagtatgattgcttcacggttgttgatgaaccgatgacagtaaatcttgatacttctccgctgcaatcaatcgatttgatcccgtggatttgtcaagaaaacacacagcagatttttgatttcatcaaaaagtcaaaatctcaatactgcttaggacactttgaactgtccggatactatttctataagaacagtaaagctgaacatgggcttgaacctgatttcttaaagaaatatgatatcgtgtattcaggccactatcatcacgctaacgaaggcgctaacgttttctatatcggtacacctcttaccatgagcgcgaacgatgaggacgaaaccaggggcttctatgagctatcttatggcgaaggtaaacgtgaattaactttcattgctaacccagtatgccaccatcgccggatcacctatccggatcaaaaagatgttgatgttgcagattacaaaaattgctctgttcgcttgattgtgcgcgaagttgataacgatttgcctaagtttcaaacaaaactggaagaaacagtttatgagttgaacattgtcgatcgcgtgatcactgattcagaagtcgatactgattttgaaatcaaaagtgtatctggattgattagtgagtacatcaacaacatgcagatcactccagaagaaaagaccgaagtatctgcaataatgagtgcattgtatgcagaggttacgagcaatggaaatagttgattacgttaatattttaaacgaagaagggcgatataaagccctttataaaatgtttggatttgatgtgattgttgcagtacagcaggattcctataatgagtatgtgtcattggggttcactctgattaaagacaactatcacgaaacaaaggtttggacatttactgtcctgaatagcatggatgaagattccgtgatatactgctttgatagcacgattacaaacatgattagtgatatatcccaaaggataattgatgaaactcaaatttaaaacattgacttatcaaaatatcttgtcggtcggtaacgtaccgatcgtcattgattttgattcagcaaagaaaaccctcattacgggtaaaaacggcggtggtaaatccaccatgatcgaagcgcttacatatgctctctttggtaagtcatttcgcgatctgaaagtcgggcaactggtgaacagtatcaacaagaaaaaatgtctggttgaactgttgatcgaatacggcaatgatgaatataaaatcatccgtggacaaaagccgaaagtatttgagatctggaagaatggcgaaaaactgccggaagattcagccgctggtgattatcagtcacagcttgaatcaatgttgaatattaacctggtgggctttaaacaggttatcgttctgggtactgctggttatgtacctttcatggaactgaaaacaccagatcgccgtaaattggttgaagatttgctttctctgtctattatcagtgaaatggacaaactaaacaaatcatacatccgtggtgttaaccgtgaactggatacgctttcaatgcagattggacacgtacaacagcagatcgcaacacatcaaaagttcattgacgaacaacgggcaaaagcaaatcagaatacggcgcgttaccaggatatctacgattcccacgtagaaacagcaaaacagattaaagcgcaattagttgaacttcaaacccagatcgcagaatgcgtgatcaatggtgaagaccaaacagcaaatattcaaaaactgcgtgatggctatacacgcctctcaatgaacgtagaacagttgcagcgtcttgaggtgatgtatcgcaagggtggtgaatgtccggcctgtaaacagccaattagccccactcctgaacgcatggaagaaattgccgagaacattaaaaacggtactcagaaacttacgctgattaagaacaagcaagatcagctacagaaaatcatggatgatttactaacacaacaacgtacactaaatgggctgaaatccaaatacgaatcactacgcggtacacttcaaaatgaagttgcagcggctaaacgtgttcgggctgtcatggataaagcacaggaagacgtggtgatcgacgaatccccagttgaaaaactccgtgaagatgaaaaggaacttgattctaaacgttctggatttgtcaaggaaaaatattttagaggtattgttacggatctgctgaaagattccggcgttaaagcgagcatcgttaaacgttatattccttacttcaataaacagattgcgtactatctggatctgttgggtgctgattatcagttcactctggatgacgaatttaacgaatcgattaaatcgctgggtcgtaatgattttagttacgcatcgttcagtcaaggcgaaagagcacgtattaaccttgctttattgttcacctggcgcgatgtaaccagtaaaatttctggtgttgatttatcccttctgatcctggatgaagtgtacgatggggcaattgatcgtgatggtagttttgctgtaaaagcactattggatgggataaatggtaacgtaattgttatcagtcatcaggatttggatccggaagatttcgaccgacatattgttatgtcaaaagtcggtcgattctctaaaatggaagttaagaagtcttaaacttgcagttatcaaaatgccagcgattcatattgctggcatcaccagatttattgcaatatggacaaatcaactgcttcctttttgctggcgtctttctatttgggttatttctgcaatacggtatatgtgaacgcagataatgtaatgacgattctgttccgcaatatggacaattgccccgttctttaggtacgtttccgttcttatgggaacacgggataccctcgaacttatgtttcaacccttcattacctggtttcagtttgcagttgtcgaagtgccaacgagtcatatttccaattatacctgattttccgcaatgaggacacacaaccctttcttgttgctttttggctttactcattcgctgtctggtttcttcggtgaactctctattcctatgtgcttctgacgcctttttctttaaccattcatagcggcggttagctgttctttcctttgatctattggaaccaactgttaacatatgtgctgcaaaaacaagtttgttgtttcctgggtacatcttgactaataacagatgcgcaatataatgttgacgcgctgtaagattaaccaaattatcatcagaatctgttccacctatgcacttaggtatgatatggtgtgattctgtatatccatcatactgcgtttgtttagcatgttctatgatagagttataaattttgttatagttcataaacatatctcttgtttgatgggccgttagatacccctatttaagaggatgaaattatgttattagaaaaatcttttgaattagaaaccgctctggaaatagagcggttttatctccacaacaattttcttgaagaaaaacatatagttactatgaaagatgttgaagaagcattcaaagataaccctatagagttgacgcgaatcaagaacaacaaaagttctgtttggttcctcgaaaaaatctattgaccgaaatccataaatacagtaaagtagcccatgtaacgaaacgtgggctttgtttttatttgaggaacaataaatgatcactgaatccaaaatgacttatcaggaagcactgaaagttttgggcgcaactggtagcgaaaccagcgctgaaatgtccagactcttcaaacgtgcatccttacgcaatcaccccgaccgtggtggtagcaatgaattaatgcagaaaattaaccaggcttacgacgtagttacaaaaactgggcctagtggcgcacgttctgagactgctggtgatgttcgcgcacgttatgcacgtcaaaagaaagaatgggaagaaaaagttgatgcttactttgtagtggcgaaaaactatttcagcaccaaatttaacgcacaggaatttgcggaatacttcaccaaatacactggattgcctaccactttcaaacaggaagtaacaaaaggtagtcacggtgtttatgcttcgttccgtttcacttctggtgatgcttactttgatttcggtttcaactgcacccctccgaatggacaagggttagccgctccggattcatctgcactgggtaacgtttctgttagtacctttgtactggttggaactaaaaaacataaaatggcaagccgtgattatcaatggggcaaaaacccagacaagatcactccggaaagcctgttcccgtctaaaaaactggaaagcattttcagccctgtacagaaaaatatcaaatacaaacgtgctgactacctggcgtcattccgtaagctgttaggcgctgacgttagcggaaacgatatctttgttgaagttggtacactgaaagttcgtttctatcgtcacgtattcatgcgtaaaggtgcgtatgtgtttagcgcggtgtatgatcctgctgtatctaagtatcgtccggctgcacaacttcgcggaactatgttcgaagatgaggacggcgcttgcctggatatgatcgttgatacgttcaaagagttgcagaaactgaaaccgagtgttcaaggcgttgtgaacgcgatcgataagatgaacgcagagtttgcagcgggacatcgttcagcatcttttgttaaacgtgtagctgctcaggaagccgcaccaaaaccagaagagaagccgaagcgcacagttaaccgtattggtaaagaggaatacttcgcagcactcaaagatattggtgctcgtgtaatgcctaccagcggttatgttgaatttgataacggcgctggtgttactatcaacttcaagcgtattgttgtaaaccgtaaagcatactactcattcagtagctttgatttcatgtactctggtcagaaacacattgagtggttgaaaggaatcgatatcgcagaagataccaaaggcgcaagcattagcctactcactgatactctgaaatctttacgtgggatctctgactggaacactgttaagagcgctttagatcaaatgaattctaacttcaaggcgggtaaattctccgcacctcatgtgaagaaggaagcagagcaaaaagcaccgaaacagaaagacgaaatcggcgcacagcctaccaaaccacaggcggctaagaaagatacaccggaagtggaaaaatcacaggctgttcatgcagcacgtgagaaagcgaatatgaacaacactattcgtaaaatgatgactatgttagtcaaagcacagcgcaaagacactccggaagatatcaagaaggaagttgatgcagcaattcaattgtggcgcttgacttattaatcaaatgaactataatgggaactgttaacgcagttccctttttatttgaggaaaatattatgagttgtccaacatggttacgtttggaaaatctgaaagaaggtacacaaaaacggatttatattaatcttggttgggttcctcctaccgattttcaaatggctgagattttaatcaatgctgttaaagaagtaagcgacacttacgaatgggaaaggctctattttcctttgattggtttgtatatgacgcgaaataaatttgaagaaatgaaacttgctgttattcgcgctacgattattaattcccaacaaagatttactttgaaaaatgcatggagttctgaatgattattcaagtatctgtacagggtgacactctgactgtcaccgaatccatcaataccgctcttgctgtatgtcgtgaccatatctcacaaaatcctccagtgactgagatcctggaaattgatgtttgggatcagattgggatgatcgacgcatcatatggatttaccccgcgagatgaagaactatctcgtatcgaatcatggctgaatgaacaggaaacggaatgaaactccctaagaacacaacactactaacccgcgaaaaacttcactctgttgattggtgtcctctggatatcatgatttttgatattgaatctcgcgtgatcaatgcaaaatatcaggggtgtagtattttctctgttgaattcgagaagattcgcggatatgatgagaagtacaaagaaaaactgaaagttatgattgaagcattaggctatattgtaactgttgaagacaacaaaatgtggatcgcaatatgagcatagtaaaagcggtgtttgcattgggaattgatatctatcacgatgatttcgcttttggatatcagcaagggttgccgtggggccactgtaaagaagatttgcagaacttcaaagaagaaaccgcagatagcgttttgatcatgggtgcaaatacgtttacctctcttccgggtaaacttcctggtaggatccattgtgttctgtctggttcaggtagttttttgaaaaccaaaaaaggcgacgttgctgattacgtgatccacggtggcgggttgtctgctgctattggtacaatgcaagcaacacacccagataaaaatgtatgtgtcatcggtggtaaggggttgcttttagattcaatcaataataaaatggttgatgaagtaattttgacaaacatttacggacatcatgtgtataacgcaccagcgtttaaacgtgatgttgcatttactctttctgaactgggtggcgcattattaaaatatgaattttctgatttaaaaactcagtacataaaagaacatgaacgcattgaaaaaatcgtagttgaacgatataaaaaggtataaaatgaaacaatatctggatattattaaacttgtacttgataacggtgttgaatcaactgatcgcactggtgtaggtactattcgtattttcggcgcacaagcccgatgggatctaaacagaggtttccccgcaactacctgtaaaaaactattcttcaaaccgtgcaagcatgaattgcaatggttcctgtccggttcaaccaacgttgaagaacttcgccggatgacctggggtgaaaatagcgataagcgcacaatctgggatgataactatgaaaaacaagctattgatttaggatacgattctggttatctggggccaatctatggtcatcaatggcgttcatttggttctctttatggggatgatgatagttattatggcggtagtggtgttgatcagattgcaaaagtcatcgaacaactgaaatcaactccagacgatcgcgggatcatcgtttctgcctggaatcctgttgatcttgatgatatggctctgcgtccgtgtcactgtttcttccagttcgttgtaatcaacggtaaactgtctctacagtggtatcagcgttcagttgatgtcttcttagggttgccgttcaatatcgcctcctatgctctcctgacgcatattatcgctgatatttgcgggtacgaagtgggcgatctggtttggactggtggtgatgtccatatctataaaaatgcggttgaacaggcaaaagaacttttacagcctaaccgttcaccaatgccattaccgattctaaaaatgccgaaggtaaatagcttacttgatttagatcaagaattctttgactcgataaccttagaagggtatcataatcacggctctctaaaagctgaaatggcagtatgaaaaatggggcttcggcccctttcttaacaaggtaagagaatgaatgacattaaagtagtagtaaaatcctctggtgtacgccagccgtttgacaaagaaaaaatatacaaagtgctcaagtgggcctgtgatggtcataatatcgatgttcgtgcattccttgaaaatgtattagaactgatccgcgatggtatgactaccaaacaaattcaacgtatcgctatcaagtatgcagcagatcatatttctgttaaagaaccagattggcaatacgtagcatcgaatcttgaaatgtttgcattgcgtaaagacgtttacggtcagttcgatcctatcccgttctacgatcacatcgttaaaatggttgaagcgggtaaatacgataaagagatcctggaaaaatacagcaaacaagatattcaagttttcgaacgtgcaattgatcatgataaagattttgaattttcgtatgctggttcccaacagttaatcgggaaatatctggttcaggatcgcgatactggcgaaatctttgaaacccctcagtatgcgtttatgcttattgcaatgtgtctgcatcaggaagaaactgggttagcacaggttacgcatatcattgatttttataacgcgatttccgatcgcaaactgtctctaccaactccaattatggcgggtgtacgtactcctacgcgccagttctccagttgtgtagtaattgaatcgggtgattctcttggttctcttaacgctgtaacctctgcgatcgtgaagtatatttcacaacgtgctggtattggggttaacgcgggacatattcgcgcaatgggttctaaaatccgtggtggtgaagctgttcatactggtgtgattcctttctggaaacatatccaaaccgctgttaaatcctgttcacagggtggcgttcgtggtggtgctgcaacactgtattatcctttctggcatctggaagttgaaaaccttctggtgttgaagaacaacaaaggcgtagaagaaaaccgcgttcgtcatcttgattatggtgtacagcttaaccagttgatgtataaacgcttaatgaatcgtgattacattacgctgtttagtccggatgttgctaacgatcgcctgtatgatctgttctatgaagctgatcagactgcatttgaagaactgtatgaaagcctggaaaaagatccaactgttcgtaaaaaacgcatcaaagcggttgacctgttccaacttttagcacaggaacgcgcacagacaggacgcaaatacattttcaacactcatcacgtcaaccaacagggtagttttacggttcctgtccgtatgtctaacctgtgttgtgagattgcgatcccaacgtcgccgctggatgacgatgataaaatggctggtgaaatcggattgtgtacgctaatggctatcgttctggataacgctgatatcagcgaattcccgaaactcacacgtattgcagtacgtgcgcttgataacctgctggattaccagaactaccctgtaaaagccgctctgaaagctaaacagcgccgctctctgggtgttggtatcaccaactatgcatcatggttagcaagcaactattgcgactactcagaagcgtatacagacaaagttcatgagctaatggaagcgtttcagtttaaccttctcgttgcttctatggaactggcgaaagaacgtggtgcatgtggattgtacaacgataccaaatacgctcgcgggttactgcctatcgattggtattgcaaaaccgttgatgaactggtagcacctgtttataattgcgattgggaatggttacgtagtcagattaagaaatacggcttgcgcaactctactctttctgctttaatgccttgtgaaagtagttcacaggttagtaactctaccaacgggatcgaacctccgcgcggtttagtgagtatcaaatcttcgaaagaaggacactataaccaggttgtgccgaaccaaaataaccagattgatttctatgatctgctctgggatatggctaaacgcggtaacaaagggtatctgtctcacgtagcagttatgcagaagtttgtagaccagtctatttctgcaaacaccaactatgacccggcaaactatgaagacgggaaagttaaaacagaagacatcattgatgatctgctgtatgctaactactacggtgttaaaaccctgtactatcataatacgcgtgatggtgctggtgatgaagatgaagccgccgacgattgcgcgggttgtaagatttgattaatgccccttcgggggctttttaaaggtaaagacatgttaacagtaatgaatacaaacccagatcataaccacttagaacaacctatgttttttggtgaagatactggtgttgcacgttatgaatcgcagaaacacaaagttttcgaaagcctgacgcaaaaacagctttctttcttctggcgtccggaagaagtcgatctgtctactgaccgtatgcagtatgcaaaacttcctgaacatgaaaaaatcattttcgattctaacctacagtatcaaaccctgttagataccattcagggacgtgggcctaacctcgcatttttgccaattgcatccgatgtgagcatggaaacctggatcgaaacgtgggcgtttagtgaaaccatccacagccgtagttacacgcatattcaacgtaacttgcacattgatccttctgtacagttcgaccaaatccttcgcaatgaagcgattatgaaacgttctgcatcaatgacacggtattatgatactctgattgatgaatgtcataagctgaaaaccatcatgatgctacaggaacaggttagcggctataaaccaaatgatccggctgtcgtgtattataacgagcaatacactaaacaggccactaagtgcaaagaagctctgtacctgtgtatgcacgctgtgaacgctctggaagcgatccgtttctatgtgtcgtttagtttcacctttaactttgctgaacaaggcaagatggaaggcaacgcgaaaattatgcgcctgattgcgcgtgatgaagcattgcatcagaaaggtactcagagtaaaatccgtttgtggcaaatgggtaaagatgatccagaaatggttgaaatctcccgtaggctgaaaaaagaagcaactgctatcttcctggaagtatatgaacaggaaaaagaatgggctgaacatttattctctgttggtgatgtagaaggtgtatcgctgaaaagcactatcgcttatattgaacaccttacagatcagcgtatgcgagcggtagggcttgattcaccattcaccccgatccctaacccgtatccgtggatgaataaatggctcaaaagtgataacgtacaggttgccccgcaagaggttgaagtaagttcttacctcgtcggaaacctgaatactgaaatcagtgatgaagcgtatgcaaaatgggccagcaaatacgcgtgattgtcgggtagtaaacaagtacaaaactgattgggatgtcgatattcaaagaggtacgaagttcggcaacccttatcacacaggaaccaggggagaaaacattttagcgtttatcccctggttccagaatcaggttcgtactggggcgatcacgattgaagaattgaaagaacttgatggaaagaggcttggttgtacctgtgcgcctcttccctgtcacggtgattacatcgcgcatgtggttaatgttttgtgtggtaagaaaagatcacttgactttttggatatataatgtatgaaatctgaattcaacttaacccttgataaatgtggtcgcatcgatcgaagttttgttaagtgtggtgaacttaggcattgtgtttattttattgcaattaacgatgaaatagtatatgttggtaagtgtagggatatgtggaagcgtttagacacatatcgcaatgcaaagtattggagagaagccaaccccagcaacatcttaaaaacgtgtcgattggaaatggctatcaaaaaacgaaaaactgtgaaacttatcgtgactactcacgatgaaaatacatatcatgattatgaaatcaacatgatacgaaaatacaaccctgaatggaataaacagcactatgacaaaggcacaaactaaaattatcaataccctttacaaacaactcatgcagttgtgtggtgaatccgaaacatttttcttcgttgatcaagtaaccgtgatgggtacacctgttcgaatctttaactatcgcatggcctcatatacagactggctaaagcctggtgctctggaatgtcgcggtatcatgtttgaaatggatggagatacccccgtatcaatcatcagccgccctatggagaagttttttaactatgccgaggtaaaggcatgggaagcgcttaacgagtctcctattgaattaggcgaagttttagacgtgatgattaaagaagatggttccttgatctcaactttccttgacggtggatttctggcggtcaagtctaaaggttcggttaaatcagaacaagctatggatgcgcacagcgtgttaatggcaaatcgtgaattgctgacccgcttaactgagatcgctaaagaaaactatacggtgaacatggaatacgtttccccgaaaaaccgtattgtcgttggttatgattctcctgatctgcgtatcctgaacgttcgtcacaacatcacgggtgaatacatcccttatgatgaactctttgctgacgcgctgttacgtgcgtatctggttaagcgtgagaatatcgaagtactggatctggatgcattcgcaaaagaagcatatcagaatgaaggattcgaaggctatgttgttctgacaacgaaagggtttgtaaaaatcaaaacaaactggtatgtcaacctgcatcgcacaaaagatagcatcaccaacaataaggatcttttcctaaatattgttgagaatacggtcgatgacctgaaacagctattcagttcggatctggtctctctgaaaaagattgacgatttcgaaaaacttttccttgatagtctcaatcgtttgagtgcaaaagcattcaaagctattgaagataataaagggaaatcgcgtaaagattttgctatcagtctaagcgcggatttgtcaaacgacggtcggatcatcttcgggcctcttatgaagtacttcgaagaaaccgatccacaaaaactggtcgatcgcatcattgaaatgatggttaaaaattacgaccagttcattcctggagagtacaagtgaaatcatttggcgcatatagccgaacgatagaacaagaaaaagcagggattgattccctgctttctttcgttgatgttttccccgaaactggaaaaatttactggaatgataaagcatatcataaaagtaagagaggaaaagaagcgggttctattgtttgtgaagaatacccttatacgaaaataaagtatgctgggaaaaattacatgaggcatagaataatattttactatgttcatggttacttaccaatcatagttgatcataaaaatggtcttgattttggtgattgtattgataatcttcaagaatccgatcccgttcataatatattgaagaaaaacaaaaccagaaaatctaaaactaccacatcaaaaggggttgactatcgttcttctcgtggaaaatatagagcacaaatacggattaatggtaaaacgaaacatataggatattatgatacagaagaacaggcgtctatcgcatatgaggaaactttgaatgaatatcaaaagcatcttgggtatgattaatataaaatcatggatatggcctattattgttgcttgctccctaatagcccttttttacattgcagttgataccaaaatagaaaacaggcaattgtctaaggatatcaaagcgttacaagctgatatcaagaaagtaaaagagacaaacaacagtaatactgtgatctatgtcgaacaaaaaggtaaggatcaacagttggtcaaggatgccggacgtaaagatctgctgtttaaaaaaccaggactgatcgaaatcaagatcaacaaatccttcgaagagtatatggcggaatacgacaaatgaaaattgcaacgttagcccttgttctgggcgttctgttggtcgggtgtgctgagaagcccccagaaaagattttgcctacgctccccgctaaggtgaatccggtgaatgtgaaatggaaagtggttgcagaagtccgagagattgacggtaaaaaataccttgtaatgccctatgacggaaatccttatgttgcattatcatatccagattcattgatttttcgtagctggatgaacgacgttaaaagacaaaaggatcagaccgataatgttctgtgtactttgggataccctgagaaatgcaaatcaaaataaccaaaacattttttcgtgacataacagaaggaaaagtttatactgcgaaaaaggataaagaaggtctatggatagaaaacgattggaatcgtgatatatggctcaatctgacgaatgagtataacaaagaactaattgaatatgagatagtgaaatgaatctgtttatgactattggcgttccgggtagtggaaaaactacctgggcgcatgagaaagcccgtgaattgggtaatactgttacgatctctcgcgatgatctgcgtagctctttgtataatgcgggtaaaggtgctggcggatacaaatacaccaaagcgaaagaagacatgattgcagaaatgcaggatcacgttgttatctccactctgaaagatggtaaaaacgtgatcatacacaacacacatctgaaagaaagtgataaaaatcactggcgtgaaattgcgttggaacacaaagctgattttcatattgaatattttgatgtgtctattgttgaactgcttcgccgtaaccacaaacgcggtcgtgatgcattacccgtttcgcgtctttgggaaatgtttaaccagtatcgtaagatccgtgggttcgtaccagcaatggaaattgttaatccccacaatcagaagtgtgtgatctttgatgtcgatggtactctaaccaaagtgggacaacgtagcccgtatgactttaccaaagtgatcaatgatccgccaaatatcccgatccagcaactgtttcacctgtacaaaaatgcagggtataagtgtgttgttgtgtctgggcgtgaaggtaatccgcaatgcgcacatgatacatgggttagcctgttgagttatggcgttgaaccggatgaaatttttatgcgtcaagaaggtgataccaggacagattttgaagtaaaagaagaaattttgtttgacaagattttagataagtattatcctgttattgcagtggacgatagagacactccggtcggaatgtggcgagcaaacgggattccgtgcttacaagtcgattatggtgatttctgattgacatataatgtgggtatgttaaagtacccacacaaaagaggattatattatgaacgttattcgtgaagataaacacatcatggttgaacttggcgatcgcattcgcgtagaaaatctgggcgattttaaccaaaaagttcgtttgttgtgccaaaaaattgctaacaaaattcaggaacagggtaaagctccgggcgggtttgaagttagcgccactccggtttctcagtactcctatattgtgtatattcatgacgtggatactaacagcacccaatctttcgggctggtgttaaatcctattactggctacgttacatgggcggctgtattatgaacgtaaaaattattgatagagcggtaattacggactaatctgtatacccggatcctcgttattatggcggtgttttcggatacatcaaaggaactgatattgatgtagtaacaagtccgattgcagaatatgatatcaacaaaaatcagacagaagttcgcgttactacaatcaacggttcagaatatatcgttgaagcgactcctgattttatcaaacagctactaaaggtgatgaaagatgcttgatcatcctggctctatgagtatggtgctcctggaagcattaaaagcatatgatatcccttgtcatttcggtgaagtaactgttaatactatcattgacgaaatcgacaacccaaatactttcattgcttgtcttgttcgaaaatttacaagttgttttcgaccgagtccagaaaaagtagtaatcagttctgtttctgctcatcatcgagtgttagatgatggaaagattcaactttactggaaagttctttatcacgtggtgtatcatgaagattgatgatattatgtttatgcttagagcaataagcgcttctaagttctctcaatgtgtctctgttaatgtcggtgctgcattgagaaatggtaacgggcgtgtgtttgtaggcgcaaataatacggttgatcctagtcatcgttgtacagatcagtgcaatcacttattagatgataacgggaaactgagtgaagaaaagcgccctgaacattcacaatggtcagatcgcaacgaagtacacgcagaaatgcgcgttattatgctggcggcgtctcatgaacaaatcaaagacgcaactttgtatacaactcattccccttgctcacaatgtgcgaaaaatatcgaattttgtgttgcaacaggtatgattaagcgtgtagtatatctacataaatacgatcgtggtggcatcgagtggatatggcgtctacagcaatacggtgccgaagtagtacaacttgaccccgaagaaatgaataaacatttccggatcaaataacaaatgagtaaatgtatgtctgaactgagtgtaaaagcatcctttgaatatgttttgattgaaaccaacgctaaagcggctggaactgaaattgtatcaccttctggtattgtgactggtgttcgtcaacacggcgaggaaccgatctacggcacagtgttatcatgtgggccggatgtaccggaagaatataaaaccctgcttatgggtaagcgcgtaccgcttcctcatgcacaaatggcaaacgtgccggatcctgaactgattgcaggaaaggcaacaaaagaagaagctcgcaagtatccggttaaatatgtaaccgcacactataaagcgattcaagcaatttacgaataagagatccaacatggctaaacaaattcaagcaatcatcgccgataccgtcgcaaaatctaaaaaacttttcgacaaaggcgacatcctcgaagcaccgacccgcatcgatgtaatgacttcaatgatcattgatgctcaccagggaaaactaaattcccgtgcttcggaagtaatggaatacatcgtacagttcgaggatgtatgcaaatacgccaaagctgttgatccggctgttcgcgaaatctaccgcaaacagttctaaaaatatcggccccttagctcaataggtagagctaatcactcataatggttaggttcccggttcaagtcacgggaggggccaccaaacaaggcaaggcacttagagaagcgggaggaacagaatctgattctgttggttgtaggtgcaaatcctacccttgccaccaaattagggtgcgtagcgcaatgccgttaaatggttcggaatatgcaacctttctcacggagaaggctctgttggtatccggtaataggttccccggaatgcggggtgaagtaaagaaactcccagcccactaattttaatgaggtttatatgaaatttcgtgaaactgtgaaataccataacgcggtcgaatatacacagatttttgttgatatgtctcccgcaaaattcaaagaacgttatggcatgacatttaatgaatggaaagatggattgcccgatggggactaccgaaaaaacttcaaattcaatgaatgttatgtggatgatgatccttacgatctggatatttttggtaaaacaacgcctctcattgagaattcgccagaacagctttacgaatcttgtattgactctgcatacgaaatttaaagagataacatgaaaaatttacaaaaactgtttgaaatgtctccggcaattagaaaaatcatcggagaaagcaatccaacgaatcgcaataaaaagttgatggaactttttgtaaaagagttcgatgattttgattctgaacttcgtaaagcgcttgaggcatattccaaacaagggttctttgcatcgccgcaagtgaatagtaagaaagagtatagcgaacgattctttgattgggagattgtcaacctcgttcgtagaacaaatatatctccgagcaatcaccaattgatttctcttgatacttcggtattcttcatccagtatcttattagtggtggtttcaaaaatcctgaaattccgtttacaaatgaagcggttagcagtgaatttgatgaatcatttgtatacatcaacacaaacaaataatcaaatggctatcttcggatagccttatttttggggtgtctatgcgctttttaaagtatgcaagttggatcgtactcgtccctcttgacattattactggagtattagcaattctgtttgctccgtttgttgtaccgttctacaacgagaaaacagggcatcttcctaaaggcttccggtggatggaaaccttcgataatcctattgatggtgatggtggacatatccgccgttgggcgtctatacgctatcatctgggggattttggggtatacatgcagcgtgttggctggttgtggagaaacaaggcttataacttcgcatatcacgttttaggacgtgaagcgacaagcaaattcaactggaaaggcaacccaaaaacagaaggtgggccgaaccctgtaaatcatgggtatctgctcatgtggaacgaatcagcatggggtttgtacgtttacaaaccgtggctacggatccacaaagtgcaattctgtttgcgcgtttatgctggatggaagctgaaacaagaagttagcgacccagttaacctggatcgtgcaatgctggcgtttcatttcaacccgttcaggtattatgtaatcaagtaaaggtaatacaatgaaagcatttcaaattttagaaggtttgcatactggtacgatctacctggaagaaggtaacgacgttcggatcgtagtatcaaaaacattaactatggattctgtgatcggtaaagctcgcgttactccgtttgcaaagcgagagattgagatcgaatatcagccaactgttaaggtggaaggtggacaacatttaaacgtaaacgtgttgcgccgcgaaactctcctggatgcggttgaacatcctgaaaaatatccacaattgacgatccgtgtatctggttatgcagtgcgttttaactcactgacccctgaacagcaacgcgacgttatcgcccgaacctttacagagagtctataatggcaattgatgatatcaagggttataaaccccatactgataaaaaagtagaaacggtaaaccgtatcaaagatgctgaaaatgcattaggtgcaatcctggaagatatcgaacagcgactatcaaattcagatattgattcactgatagaggaagaattagatgaggtgcttgaacgtatccatcaaattcaactagcgaaagaccgactgaaagaagcctctatgtgggcgtgtcgtgcggtgtttcagcctgacgaaaaatattaaaaatcaagccgttgccgaaaggtagcggctttttcttttttggtgtaaaaagttgttgactcccttctcacattcccttatagttaatcccgtagacaagaaaacacttttatgaggatgacattatgaaacgctcttacaacatgaatgaactggttttcttcaaaactcgtcgtgaagcacgtgcttacgttctggcggctggtaaaaatacttctgctgctatcgatatgggtactgataaagctgttggtgctcgttgggccgctgttatcgttatcgctgctccggttactccggttaaaactctggtacttggtgcgcgtcacgccgaaactcttaacactgctgcaagcggtaggggccacgaagttaaagtgttcaagaagcgttcttatctttcatgtgcaaggggttaactatggcacgattcatatataaagtggaatacgaaaatactgagttatctgatacctttttgaagatgattcgtgatcacgggcaacgtctggaaagagtaacgattgatactgcttttgattgtcctgttgggttggttctgacattatcttgcagccccgcaaaagaatcagcccgtgtagaaatgttacataaactaaatgcattttatgaaggtggtagtgtatggcgagtattgtaaaatttttcaccgactcagtgaaagaaattaacagcgctctggaacaatggaacactcgctgtgatgtatccattaaatcagagtacgaaacaacttatgatcgttatgatcaggcccgtggtttgcacaataacccccatgaggtggaagtgtgaaatactacggattcaaaacgagtcattttggtaaagcgtatcgtacagaaaacatcgatcgcaaacgtccgtactatgattctttagtacgcgcgggacgcaaacgcgctcgccaggaagggaagaaggaagcagaaaatgaactttgatcaacccattgcaatgataatcggtgctgtcctgggaatgcttcttttgtttggcggaatcccattaactgcatatatcatgaggttattctaaaatggacatcggatcaggtagtcagtatccctcatgcgctttaagcaactttgccccgcatccgtttacgttcgacggggtagaatgcgcatcgatggaggggcttttacaaagcctgaaattcagcaatccagacatgcaagcgcatgtatgtacgctggttggtaaagccgccaagttcaaaggcaagaaaaagaaatggtatcgcgatcagaccttgtactggaaaggtacaccgatccatcgcgaatccgaagcgtaccagattcttattgaaaatgcgtacaatgctcttttcctgaatgacgggttccgccgtgcgctggcagcaaccggaaaaagtaccttgacacattcaatggggaaatctcgtatgaacgaaactattctgacagaacgagaatttattagaaatttgaacaggttgagaaatttgttatgaaaagcgctgataacctaaaaaaagaaattgaaggaatcaagaaattattgcattatatcgatgttgatatagagactggaatatgtacttggaaaagacccagaaaatctataaatgttggtgatgttgctggatgtaagaaagaaaaatatcatgttatttgtttcgattataggttgtatagacgacacaggattgtgttctattttgctaaaggttacttacctcaagtagtagaccacattcatggtgttgaacatggcgacggtattgataatttacaagaggcatcgcaaagacaaaacgttattaaaaagaaaggacagaaaaacaacaaaagtggttatcgaggggtgtgttggtcgtctcgtgctgaaaagtatcgagcaactataggtattgatggaaaacaaatacatttaggatatttcgatactccagaagaagcaagtaaagcatatcatcaaaaagcgaaagaaacttttggtgatttttataatccattggttaaatgagatctgttatgagtgaaaaagaaagagtagaatgcgtgttcctgttcaaaggcgcgattaatccattagcgttactgtatgcacaacatgcattacgttcaacgttgattcagagtgttatctataaagcaggtgtgtattatgttaccatcggcgcaaataacatggttgttattgaatcctatgttaaggaatgtgcatcaaacggcgttgtctttgataaagtcgattttgatgcaggggtagatgctgtttatatgtataagggttgatatgagttacgtagtttatttcgattgttcggatctcgatccgttcgtgcttcaacaggcaaagaaatatcatcaagatgtcgttggcattggtgtaacaaatgatgatatgttgtgcatcgaatttgaatattatcggacatttgagcgtgaacaattcctgggtgaattgaatgcattcaaaagtacccttttctttgatcgttatgaggttatatcttgacagaacttgatgaactcgttgacagtttacgaatagatttcgaaactggtaagtgtttctgggctaagaagataaccaaaaagactgttgttggagaagaagcgggttccgtccgtcccgatggttattgtagaatccggttcaaaggaaaatattactaccgtcatcgagtcatcttttatgcacggaataggtttcttcctgacgttgttgaccacataaaagaggttgacaatggtgacggtgtaggtaatattcaggcagcaactcaccaacagaatatgatgaaacaaaatatcaattcgttgaataaatctggttgccctggtgtatcatgggatacacaaagaaacaaatggctttccactattaaaaaggatggaaagaatatctatataggtcggtttgcgtcttatgatgacgcggttactgcccgaattaacaaagaaaaagaactatttggaaacttttataatgagcacaaacgcaaagcctgtaattctgactgatattgacgggatcgccgtaaaatggcagtcggggttgccgttctttttgtctaagcacaacatgcctactgatattgcattagaaatggttacagatgaaaaatttcgtgatatgacagaaatcttcggatgtgatcagcagttggctaaaatccttatggaagaatacaataacagttctttcattcgttatctgaatgcgtatgatgatgcattgattgtgatcaaccgtctgaaaacgcagtatgatttcgttgccgttaccgctctgggaacaacaccaacggcaagccttaaccgaattgctaacctgaatactctttttccttctgcgtttaaagaggtgatggtcgtgggccacggtgaaacaaaaactcatcgttacctggaagcgaaagcaaagtatggtaatcgtctggtttgctttgtcgatgatctcgcgataaacttaaacgaatgtcataacgtcattagtcagttgccgttattccatatgttacgtggtgaacgtgaagaaacaaatgcacctcaccagttagtaaaatcgtggtttgaaattgaagagaaactaaatgatcttgtcaatccttaatgaacttgcttctactctgaaaactaaagagaaagaagcaattttaaaacgtaatgcagataatgaattgttgaaagaagttttccgcattacgtatacaaaacagattatgttttatgtgcgtcaatttcctctggtagaagggaaaccaggcacaacaccgctttccgatgcaatcaaagcattactggaagatttagcaagccggaaatatacaggcaatgcagctcgtgatcgtttactggatattgtatcatcagtgaacattaacgatcgtgaagtgctacgccgtatcattaaccgcgatctggaatgtggtgctggcacaaccttaccaaaccgggtatggaagaaacttatacctgaacagcctcaatgcctcgctacgccgtttagtgaaaaggctttacgtcgcatcattttccctgcttactcgcagcttaaagccgatggtgcgcgttgtatggctgatttgctggaagcattaaaccgtaaggtatcgagagcgggtaacgagtacgaagggttaactcagcttgatatcgatctgaaaaagattcgcgattatctgggatatgatgtagttctggatggagaattgatttatgttccttccggaaccgtaccaacattacctgaacctgaaacagacatgcctttttctttatctgctttcatggacgatgatgataacgacattgcgttatttgcggaagaagttcgcaaagtatcgaccccagaagaagaacaggccgaagcaaaacgcgaagaagggaacgggatcgtaaacaaatctctgaaagggacgatcaccgaagaagaacagcgaaacattgtttatgttgtttgggatattattccatatgaggtgtattacggcgaagctgaaagtgttcagacttatgatgagcggtttagcctgttgcgtgatatcctcctggatctttctctgccttctgttcgtttgattcagtctaagctggttaataacatcgcagaagcgaaacaggactataacaattaccgcaatgacggtaaagaaggttctattctcaaaaacagaaacttcaaatggaaagattcgcgagtagccgatcaggttaagctgaaaaacaaaaccccgattgaactacggatcattgatatctacgcgcacactaaagaagaccataaggtcggcgggtttgtggtggaagatttatccggaatggctcgaacgaataccggatctgggttaactgataccgattatcgttacgatgatgatggtattacccgtgtatacattccattagatgaacgtggtgaactggatcgcgaatacatcatggcgcataaagatgaatacattggggccattgtagaaatggaagttgacggcctccagaagtcgaaaacgcgtaagaaaggggaaccggaatacagtttcttccttcctattatcaagaagataagacgcgataagaccgaacccgacgatattcatattgtctttgcagatctattttaataaaaagcccttgactccggtcgggggctttgttatattgcatatcgaaacgtaaatcactaagagaatatattatgactagtagttatcagaaacacaaaacccttatggcaaacctgtccggtaaacatatcgacgaagtaaaatctctgctgacagtgaccgaaggttcccgattcgaaacaaatcacattatcaaaccttctgtgaagaaagtactgaaagtgatttaccgacatccggtgtatcagtgcgttcatatcatgaacaacaacgcatttattttcgtatataacgaatccgatgataagtgtgttggtattttccgaaaacctaactttgaatgcatgagcgaagcggctgttgcaaccccgatcgttgaagaatatccggattatgttcaacgcaacatgcgttatgtgcaatcccgacttgattatgcatacgatttcaattctgacgcggtagaagcgctggcggatatcctttgcaaaaaccagaaagatcgtcaaatgacaaaatatctgactgatccaacaccgccaacaattcgaatttctgttgaagttccgtttgaaaatcatttcatggcagttgaagcgcttgctaaacttggtttagaagtgaaaacagaagccgtttaatagcactttttgttaaagaagcctcttgcaatgcagggggcttttttgtatagtgtgttcattgaaacgaaacacggagataaacaaaatggctcacatgatgaagaaagcagaattccttaacctggttaaagattgcggattcgctcacttgaaaacttttcgtggtagtgtttacctctatgaccgcgaaatccaggttgccgaagtctattgcgcttctaacatgcaagaatctggcattatctctgcaatgaaccaatcaatcaaataccgtaaatggatgggctgattatgaaagttaacgtttcttatgaatctcgcgttaatggcgcacagtggcggaagctggataacggacaagtggaaaggcgcttacctggttccgatgagtggacacttgcggcagtgttggaaaccgaaatcgatctggcaacaaaagacggtattttgtttgaggtgaagaaatgatcacactcagtgattatcttctgtttactgctctttgggcggcttcgatattcataactgctttgatttacaataaacgtgatgattttgggttgtgggtattcattcacgggtttcctctttctatgtggatcgtgatgactgctgaaattctccattaatagcactttttgctaaaactatcttgttcttgtttggtatagtgtgttcatcgaaacgaaacagacaaaaggaacatcacatgaacttcatcgatatcaacaaagatttggaaggtaaaaacatcaaactcgttaaccgtgaaatgttagagagtcttggtaacggtggcgaaaaattcagtgaagaattctataacaatttatcgttgatgacggtcaagcgcgttgatgttcagggtggttctggttgggtttctgcaattccggtttcccttgtagatcaagcaacatatgacccagttgctgattcatgggatctggaaatgccgttggtattcgaagaagtcatgaagtgttacgaaatcgcataagggtattattatgaatagcggaaaattacaaatggaagttagcgaagaagaagttaaagagcggttatcggtagcaagaagattccttgaatctatcgaccctgataaacttggaaaatgccctgatacgatttgccttaattgtgggcgttctgttcttgttggtaaatgctgcgataatccaaatatagttgtgatggaaaaggaacaagtatcccccgaaacatgggatcagatccaggaaatcattaaaaaccctccagcgccaactaagaaattacgtgaattgatgacaaggaaaatgaaatatgagcaaatttaaattgagtgcaaccgttcgccttattcgttggaatggtgaagagatccgttatgatgaccccgaattcgcccatgaaattctttcgcatcgtttgggattgaaaaacgcgtcattggttcaaactgttaaaacatcagcagagccggaaatttggcgttgtgttattctggatctcgataacaacattgattatgatgatcctaagaactatccgcttctggaagcacaagttgagaatgctccagaagacagacagtgttttttggttgagttgccacgcgaacattacgaaaacatcataaaggcccgtaaaaaggtcaataacaatgttttcgatctccacctcggattgtttgaggattaagtactgctagttgtgttcgtagtagcggcgctggtaggttcccccacctgtatacattcaagtgtttgcaggtggaaatcttttgatacgtctcgaacacattcaacgatcagatattttcctgcatactcttccccaaatacctcaatgattgcccctaccttaacatctaaacgaccctgctttatatcgaatcggatccggcgttcatagctggataacaattgcattttagacgcctggaaaggtttaccttctgaatctgggttctgaaagttggtatcatagattgcattacggtttgtgaagatccatgtattctctgtgtctgtatcagccagtatatcaccgtacatctttttatcagtcaatgacagactaaagaaactggcgtctttaaacagcgttgtgttatccttatgggtaatgtactgggcttctgtgaatatgacagtatcgccaacaaacacgttatcaacgttaaatttgtatgctgggatcggtgtctgggccagaatgtcagttgaacttttaaggaaaataccggaaccatcttcccacagataacagaaatcagaagaaactacactttgcccgttgtccctgatataatcgaatatatcctgatatgtaccatttagacatccaggagggatacgtatgttaccgccgtcaacttcgggggtaagtagtttcattttgctatacagtgccgtcatacactctgtaatcgtctgtacggcgttgttactaaatgaacgggcaaacttacgtctgaacgttttatgcagcggagagaggttcatacgcagcacagagcggtttttatcgtcagtatctacgttagagtaaagcaatccgtaataatgttgttcctgtgtaccgttatactggaaagatacctgtatgatcggctggataagttgctgatagattaactgtgcgtcgtatatctgcatcagcgtttccgatgagccgttaatcatcgtcttttcactaaacgagacaagagcgggtagcaattcagtatatgcgttatcaatgtatttttcgtatgatgtatataatttaatcgatgtgactcgattgacgattttttcagccataaaaatccctcctaatatatcctatttactaaatagtaaataatgacccaggttcaatttgaggcaataatgaaaaataaaactcttgataaatttatgactacacggcttgaaatcaagaagactaacgttaaaaccgttcatcttccggatggaacagccattgagatccctaagatgtcgtatcgtcattttgtaaagattaagactctgaaagatgacccagttgcgatcatgcgattcatcattgatgacatcaaaccgcgtgaactaacagcagcggaaattgaatttgtgttgatccatatgtatgcacacaataacgctgattatgccaatacgcttaaagaaattgggctaaatcttgatgacctcaaaatctccgaaccttgctatgattttacgtttgacaatgtgcggttagtctttgacaaacccagcctgttaaatgctcaccttccgttcctcatcaaagaggcatatgttgacggtaagccagtagaattaactgaggataaacgagacgaattaattaattgcctgtaccgattcgaatatgatcaggtatcgcgtggtgtcctccaggaagtatacattattcatgaggggaaaaccatcaaagggcttaacatcattggtgaatgataatggctaactcttatttcaatgaagaacaaaagaaaaagtttctgaacagaaacaacaacaaacaaccagcggtcaccaaagtaacagcctcccttgatgctgaaagcgcccgtgacctaaaggaaatcaacgataacacccttgaaagtgcaatcaatactcttgatatcaaagaggggttgaaatcgttcgaagaaaaattccgtgacaaattcgcggggttcaaagaacaatacgaagaggataaaaaggaatcattagccgaacaactacctgatttcgtcggcccgatccgtcctatatccttaaccgatgataattcaaaaactgttgacaatacagtaaacgttaaccaaaatggtcagttcggtaagctggaagaaaacaccgaatctatttttcatgctattaacaaacttgttgatttatatgaaaatactgataagcataagcctcttcctgaaccagtggaagaacctgatccgtatgtagacactaagaaaaaacgcatcattgatgatgaagacaaaagaagcaaaactctggatagcattgctaaaagtctggtttctattaaaggctttacatcgcagatccttagccgtttcattggttactctctggaagcaatggcaaagtttgctaaatggacgctccttattggttcgttaatctttacattcgatgtgttgcgcgtcacaatacgcaaatggttcgaagatatcctgaaagaaggggaatcctcaaaaaaactatttggtacatatctgggtaacgtaaaggctatcgtaacaaagatcgaagaaggtttgaacaactttaatatgaacaacttaggcgaatcacttcgtgacttgttcgttgagcctatgaagttattgggacaaactgtacaaacggcaatcactgagggtatcggtcgtcttattcaatcattgggtgaatcaactggtatagacagcattaccaatgccggacgcggaatgcagatcaccgctttacgtgataaacagaaatttggtcttgaattgactaaagaagatattcttatgatcaagaaacaggaactagaagaccaaaaagcggcattagaaaaagaagataaagctattgcagcacgtcatgcattaacaataactccttctcaaattcctaatggttctatctataaagttgctcctactgattatcaagaaagaaatcagaaaaccgtagatgctgataaagaacggcttgataatatgaagaaagcaacggaagaaatgcagaaacaatacgatttagctaaaagcagcgaagaggaagcacaaaaattagccgatgaggaaaacaaacgcaaccgcgcacgtatagaagaagcaaaaaggttagaacaagcgaggaaggaaggaaaacagccgccagaaggtgaagagaaaaagggtgatgatctgttgggtaaagcaaccaactatgctaactctgaaaatctggatgcagccgatatcaaatacattaacgatgaactgttggatcagcttgaaaaacgtcgtaatgaaggtaatctggacgatgtacagaaggatagaatctctgaccttatcgagcaattgcaaaacaagattgcagcccgtacagaatccagcaccccgatcgacgcacagccaccgttagcagcaaataaaccggatgctgataaagcaagcaacattcaggttaacaacaaaactgttaacaacaacgtaactcattcagtacaacgcacagagcataaaccgctcgtagcgctggcataaggaacatataatgaagttttctattattgatgacagtataaacactctcaaaaatattaaaaatcgcggtatcccctctgggggtgccgcaatcacagaatcagtattaaagcaaactatcgttaccgccgaatttccggcccaacgtgcagcaggtatcgataacgcttataatgcttcgagtctgtataataacggccttctgttcactgcatatgattttaatggtgttggtagtaaagacaactatcgttcattacgtcaggcagcacagaacccaaaacaaatactatcatctgcgacgggtaatgttaagtacaaacaagtgttgaatagttctattggtactatggaacctgtttgccagatcctgctaccgcgaagcctgaacgataacgaagtaaacagccaccgctatcaagatgcaaacgatagtttcttaaccaaagggttgagccgtgttgtttcaaacatggtatggggcgctgtagaatccatttcaggcggtattatggcagaccgaagagaagcccttgatgttggtactaaagccgctttccagggttctgacaagcgaacaaagatgtattacaatacattcgtgatcgaaagccgtaatgatttgctggaactgattaaaatctactatctgtttactgttctgggatatggtacaacttctggcggtactgctaaagaggttgctgcattggttaaacagtattacggtgttctgggtgctaaaaccgctaacgcaattagcccttccagtaacccagtaacagcgtcagattttgataatagtctgggtaatgacgtggttgatttcatttcaaacgtagaggttattaaatcgcctcctgtctggtttattcgtgatttccagtctggggattccttgcgtttacctcattcaacctttgggccagcaggtattaccagtgttcgctttggtcgttctattgataatattgtaaatacattaagagaatcaccaaataccccgatctcacttgaggtcgaaattcaatttatggaactgatcgatatgcgtcaggattctatttttgatacaaattactaaggagatatgatgttttacaacgtagatgaatttttatcaggtatggctaatcgcgattttcagcgtagcaacctgtttagcgttgtatttgcaaccagccctgcatcacgtatccttgacaacacgatcggtagtattcgagatactttgattgatggatctattagttctatcaacgcaaacaacccgaacgaattcattaatgctatcactggcggtgtgagtaaattgtttagttacaccgtcgataaggcgattatgtcgctgaacaaaacaggatttagcaaaatcatcggggcaattagcccccgtttgattacttccctgtttggtgatagcatgtatggacaactgctatctgaattccgtgatgaaatgatgtataatatgggtttaagcattatgggagttaacctccctggtaaatccattgggtacgaatacgtttataatggtggcgtacctcaaatcagattcactcgccctgagaatggggaattgtcattgacgttccgcaccgattcagaagcccgtaacctgaaaatctttaatgaatggatttccgctattcgcgatgatgtaacaggacaatacgccttcattgatgaagtgacaagtactattcaggttaacttacacgatcgtgatggttcaccgcatacaacatacgtatttcagaagtgcttgcccgtcaaaatcagtaacagtgaattgagctatgagaacaacaacgaaatctggacatttactgttgattttgcctataaaacatcatgggttgttgaggctgataaagaaggctgggaagggttcaaacaatccgtagaggaaggtttagccattgcagcacgtaccgcaattacaggacaataaaggggctacggccccttttgaggatcttatgtttgatattattcgagtaacattaccatcagggatcaaacgattccctatgtttacagttaaagatcagtttaaattaatgctgacccgtattgatatggaaggtcggccccttaaagagcaacaggaaatactggatgaagtgctggatctgctttatcctgggtattccaaaacagaacaggaatacattttcagccgggtgtattgtggttcgttcggtaaaaacgttatcaaggttgtgataggcggtaaaggtgggggccactccgaagccttcatggtgattaatgatattcaactggaaaacgaatacaagctgaatgatgaaatcacattagggtttaacttcccccgtacacgcaatacaagcgaagagttgtttcttgaatgtatcagttatgtaatatacaacgaacagcgctatgaatggacatcactaaccgaagaaacgaaagagaatattcttgatatagtcgaacttgatgatgtcgaaaaaatagttactatgctaacgaaatcggttgatgtgtctatgcgcggtaaatcatttagtggtatgttaaccctgttcaagatcctgtttagtcgcggggatctggatgaatttgtgaagaccaactatctgctaaataaaaacggcctgaacctggaacctatcatgaatagtagcccaatggaaaggcaaatttatactgcattgcttgcagaagacttgaaaaaacaaggtgctgttaaatgagaaagcatgaatataaacacgttgagaaatataatgttgattatcgtcctctgacacatacagagtttacccccaatgcagattttatcaaaggggatgtttacctgtatcaaaaagaatatcttttcattctggcacttctggaaagtaaaaatattgatacccgtcaactgttcatcaactgtgaagaatgtcaggaaagaatagaattccagcttaaacgcaatcaaatcatggttgaagatttcgacgataagctatacggcaatgacgggatcgcgctatctgttcaccctcgtaagactggtgatgaagagatccccgatcttatcgattacgtaatgatagacggcgaacagatcatgtggagtgattgcagcgacaaagataaagaaatggtgttggatgcaatcgactatgcaacctataaatcgatttctaccgccctggataagccagcagtggtcgcaaacattccggtaaggtgttcgtgtggacatagccatatcgtctctctgagaggcttacagcaatttttaaaggtggtctaaatgggtgtaaatctgaggttgctatatagcgatatagaacctaacatgcaacgagattggaataatgacgtagcggcttcaaaaggggccgcagcagtaagaaatagtttgattggtatcgtaaccacgatcaagggtacacgtccatttgatagtaactttggttgtgctattagtgatatgctgtttgagaacatgaaccctctgacagcggaatcaattagaacttctatcgtatctgcgatccggacatatgagcctagagtatataatctttctgttgaagttattccacagtatgatgataactcagtaacagtaaccatctattacagcatcattgatgacccggatgacgtagagcaaatcaaactacagctttccgcatcataacaaaaagccccttcctttcggttggggctttttgttagaattcaatgaatcccattagtgtttgatatcgcaattcaaacggggagatataactttgcatctggttttgatcggatacgatgtaataatacacctcatcattatcatcgtatagtgcttctttgatgatgcaatatcgatcggtttccacgttcacataaagagtatccatgtactttgtaactttggaaccctgtgaactgatctcgtgaatagcgttatctatgaacagtgacaatgcttgcatgaagttatcaaactcaccatattcacagcccataatagaaattgcagtgtattggtgccagcctttgattgtgtctccacggcggatccatccaatttgtctacccccgatagatacacaccacactttaccaatagggctatagaaccgcacaacttcttttaataacagggacatgaccccgcattttgtataaggattcattttaacctcatttcatatcaagtagccatgaagggctagtttcaagagaaatcgcagtatattcgtattttacagtataacctttgaaaccgaaaggaataattgcattttcattgagatattttactttatgctttgcttcttcttcattcagagcagcacagactgttgtttgttcaacgttaccagcaggagaagtaaatttttcaatgatgatatatacgcagttcatcctattgtcctctttccattttttcaagtttcatcgtatccacttgcagttgaagtttaagaatacaacctttcgatatgttatacaagtagtcactaacgatttttgactttacctgatcgtaatcagaagataacgtaatccaatcatacatcgtttggtatgatggaagatacgtacattgttcttcttttgataacgctttaaatgattggtaatcggttggaggttccgaagcaattgcggttgtggtcataagactaagtgcaagtagtagatatttcataatgtattcctcattgttttcgatagaaccaatatagcaaaaagccccgaccgaagtcaagggctttttcatcaatgcaagaaagatttcacgtactgttcgatcttttcacgacatgtatcaactgaggtgctttccgcaattacggcatgacataacgcctcgcctccgacccagaaactcatcatgtactgaatatcacgaccttccatttctttttgatgcgctttgattcgatcgaaagcgttttcgattgtttcagtagcagtaagcatttcggattccccgtcaacctccgccagttccccatcgatcatttcgctttcgacttcttcccagtatactatcgttatcatgcattaccccagtggttaaccgtcgtaatccccgccacaattcacattgccttcaatgaacagttcgcggttatcacgtaataaattatactttctttcgagttcaggcccgaacgcgtcggcgtcttcataccagctataattgtatcttccgcattcatcatcatattctggttcatcgccgcgttcattgaagtgaacaattttgatatcgtccatccccagttctttcaacttatcccagatatacgaaatctcaacgctatgggaaccgaacgcttccagtgagatcgtaccgttgctatcgacttgaggaataccccacttcgaacgagtatcatcggtgatcatatctattaatgactcaatattattctcaccgtagatatcagcaacttccttttctttaccagggcgaacaagtccgatcccgataataaagctactgcttgagctattgctcacaaacccagaacgaattttcatcgcatcaccatattaccaatcatgaatagagggattagcgcaaagacgataccccatagaatgaccttatcttcacgacggtcacacccatgatagataacacctccagcgaaaatcaatacaacaactgaaacgaacgcgaataaagaaatcatttgcgggtatccattctcatagaaacttctttcaggatcttattcagatcgtgaagcgcatcttttacgttaccttcgttataggtaagcatatcctggtacagccctttcaaacaacgattgataacatatgctttttcagaaggtaacattgttccagaacgattataatctctgaaaatgtccatcatcgtgccgttgttgccaggtaatgacgggttgaagttaaccataccagacatcaaactatcaacataaacaacggttgtgttatcagaacgatacgcgccaccaactttaaaccagttgctgaacacatacggagattcccgcacttcgctcaaatcggttccgatttcatcgatgtttacacgaatgttgttaaaatacaccgattcatcaatagaaccaggacgccatacgatagcaccgttgttatttttgaatccgactacatcaacctgccagccgttatctgttaaccggacatcatcaacgacgatgaaatcaggtagctgtgaatgaaagccgatgttttcaggacgggaattacgaaacccatcacgattggagaaataaaggatgtcaccttgattcagttcgcatatattcataagatttttaaagtccaattcaagtaattccacaagtcacctcaaagccccctttcgggggcgagatctcattagagtttaacttctttttcttccagaacgattgtgcaatcaaatttcacatctttccagaattccgctgcaacgatatctgttgcggtaacgcttacgctggtttcttcaaaatccagatccgcaaaccatgcgtgtccgacgacaataccgtacattacacgactcaggcgattattaagggcgcgaacctctttaatagtttcctttgtctgcttatcaagatactcgatcaggtcattcttgtcaagcgcttcgatctctttagatacagtatcataagcccacagaatgatcaggtcgccattgttgagtttcttcttaccttcggcgcgttttgcaacggtagcagcaacagccggaagtgatgaaacgcctttgattttcacgttcagttctttcgacatgtaaacatcagtcgattctgtgcgctcaaccttcggagaaaagccgtaatcacggatcccttgctcagacaaccattcaccagccgcctcaccaaagcgctgtttaagcccttctgcgttgcgtaaaccaatcgcgttatcacggaagaacttcattaccttctgacggcctttcaggatttccagacggacgttatcagcaacaaattccttaccagaaataccgcgagtcatcgaacggttaaccagaggcagagaggtaaagtcaaccagtacagacatacggtcttcaccaattttagccagcggtttgatagtcagaccagaagcacgtaagtttttcagagtcgggatatcggtttccagcggaagtaccttaacgttaacgataccatctttaacaatggtaaagttacgcacttgtttggtttctactttttccggcaatccaaactctttttgtttgctttccggaatggttacgtaaccttgtagatccgtattgatagaaatgttcggacgggaactgttaccaaccaggtgtttcactgcaactttcgttgtggtttgggtaaattccggtttccatacttcatgcgctaccagttgcgccgccagtgctttacgttcttccggagtagaagcgtttgcaatctgttctgacagtttatccagtgtatcatcatctttctggacagtctgacggcctgtacgattgtacgcccagtgttcagaagacaggtcgatcactgtgtcggtttctgccagcagttcgagagcatcaaccagagtaaacgcgttttcatcaggaaccatgttgtaatcaacaccatccatcagacgtttagccggatcaacaaccgcttcggagatcatatctttagcgttggaataatcctgtttggtaaagcagttatcgtatgctttaatcagacgcacatcacccagctttttcagaactttccatgccagatctggattcatggtatgaagcgcatgatacagaaccacatacagaacctgttcaccttctgctgttgccggatcgaagccgtcaacgtcattgatcgcgttttcacccagcgcccaaatgtttttgatatgttccggaaccagaacaacaccatttgcagcattcaggacatacacacggccttcatccaggtagatcgcatgagttgcatcgccaactttgacttcaacacgtgcggaggtttgcgcggtaatgatttcatcaaatgcaggtacatacgcatcaaacccttcaacgaatttgtgtaatgcgttggttgcttccgccattttttccagcagaggacggtttacataataaccatattccaggaaagcaatgttgttaaacgtcaacggcagagtagaacacgctttcaggatgtcatcagtacgccagcagttatcataaccatcagtcaggaagatcagactgttcagattgccattatccgcttgcagatcggtagcgacttcaaccgccagttgcagaggttcaacgaagccagtacatccggtcggacgcagataacgatcgatagcatcattgattttgctcaggtcggatacagagctaaccttttcgcccacgaatacagaaccgaactgaccacggctggagaaatacagaatagatacggtatcatcctgcttaaccagcgttgccagattgtttttcaggtgctgacgaatgcgcgggagttcgttatacatcgatccggatacgtcacaaacaaaaacgtggttagtcggggttggtttggctacggcgtttttgaattcaatgttagtgatcataattttctcatttataggtaaattttattaaaatttcgtttacttttttgctaatagtatctaatgcatcatcgcatccaaacttactactcaacaatgaaacaaaatcatccatcgttgttgtttgagactcgccaacgtcaaaagacagagcgtaggcaacaggatttttaatccttacgatttgaatagtatactcattcagatcgaaccgttcaagatattttcgcaaagaaaataaatcaatcggtactggtagagtttgactaaacgttatttcttcccccagttgataggggggcatttttacacagatttcgtattccatcagtgatgactcttcatagtgtgttccagattacggaaaatttgcccgtgttcaagctgtgattggaattctccgcattcatcagagtaagtaaattcataaatgaatacaccgttctgattgccaaatttagcgttgtactcttcatacaaccacatcttgatcagagcgtctttctcttctgtttccagatcataccagtcacgcccatcataagcaagcgcaatttgaggattagaccgatatcgagtttctgcgctatcttcggtttcccattcataacgcttatcatcatagtatgattcgaaaccatcacccatatgaccacccaggtcgcggtgtacttgctgtacaacttcttccgctgtcgggcaagtcatccagctataaccacagttaggaacacaatcacccatcatttcgcggagattgttgatatcagtcggatccttcgggaaccgtacaataaagctacttgatgaactattgctcacaaaaccagaacggattttcatttgatttcctcaaattcaaaagcggtgaaatgttttctttcgtcatacccaacagtacaacgatgcgtttgctttccggtaaacccgtcaaacacagttacacaatagtaatgcaacgacggaagcggtgtatgtttaatgtatttgatcgcgacgttcaggtcaacagtagaacatacacaatcagacgtttgctcaaaacggtcatcaaaaatcaactcaatgctatagatgttcatctttcacttccttcatgtttttcataacctcttcaaaagttacggggatttcgttgtactgtagtgattcatcatcccatacatcgcgatgcccgaatgttgaactttttgcaatgattttttcattttcccatacatcaatagtaacatgatcaccaagataagggaaattaggaactttgttcagcgcatcaacgcagttttgcaatgattcagaaacatgggcaatttcagtgaattcataatcagcactataagaagctacgtaaatcatcaccaccccctaacgatgctaaccagcagtaaacccaggatccagaacacagcaaccgcacaaatacgggccattactacatttcagcgactagtccactccgcactaagaaacaagaggacaaaagttaacgcgtataaaaccatttcaataacttcggtaatcatataaacctcacgaaaaagcccctttcggggcttgtttaattaatgcccgaacacaccacgaatagactctgcgaatgcatacagttcaggatttttagctttcactgtttcgatttgctccagaatgtaatctggtttatatttcgcaccgaaccagcagtaagagaaagagcgatcccacatgaacacgttatagtattcaccgttgcgaacttcaaccatcacataaccaggattagaacccagcgggtaatctttcagaagattgaatttcgcgccagcaccagtacatccgttaaacaggtcattaaaagtcatggtatgttccttttgtcagtttcgtttcaacaaggtcactatactattctttgttatcctatgcaagcgcttttttgatttgttttgcaattgcttcgatcaccggaacagatacagagttacccgcttgtttgtacgcctgtgttttgctcttatgcatcttgaatgaatcaggaaatccttgcaaccggaaacactcgcgaggtgataacattcgagggttcttaccttcctgcaataccagacattgaacaccatccttatagtattgggctgttatcgtcccagtacacacagaatcaactgtaacggcctgatagccaaaccccttgccgtttgccttgtttcgttctttacgctctctaaagcccttccaggcacgatctgatatggtatattgatcattatccggttcgagaatgtcaccgacccttgttggggtacgtggaggaacaggaaagctaaagaacaccggatcgcgaaagcagacaataaacacacgctctcttcgttgaggcaatccaaaatcttttgtattcattacctgataatggatatcgtatccttcgtcctgtaacagcctgtagatggttttaaacgtgttgcccttgtcatgggttaatagctggggaacattctcaaagaacagcacagagggctttttagcccgtataatgcggagtatttcaaagatgatagtaccgcgaggatctaacatgccctgttttaaccctgctttactgaacgcctgacaaggaaaccccgccaacaggatatcgtgatcgggtacatcgttttcatcaatggtgaatatatcaccctgaatattttcatcaccccagttatcagcatatgtttgttgtgcatgtttatcgatttcagacgttaaaaggcattcgaccccgccgaatgccttatcgaaaccgagcctcacgccaccaacaccagcgcaaaggtcaattattttcatacgtcgaaatcaacctcatcgattttgtatgattcttcgccaatatcagcccatagctgaatattcacactttttgcatcacgataaagagattgaccacaaagcccacctgtataacaagtttctgtaatctcgttaacttccaggcggaggctattgcgcataattttaacaacagccttttccattgccgaatctagggttttagtatcacccaatactacatctttaacgttcaaaataacatcacccattatcgccactccgtttcaattccgtgtttgtatgcgtcaacgcccagaggggtgatcactaaacacatatcagtatttttcgttggtgaactaaacgccattgatgcgtaacctttttgaatcagggaatcacgccctgatttactgggaacatcgttgaaatctaaatccaacatttttgacgagtatccgtaaagtttacacagaacatcaatttcagcgccagataatttcggatatgtcatttatagtacctcacaacatgttcagaatacacacgttcaatgaaatcattccagaaatcgcgatcaacttctttcggataaccagatacagccgccagcttttcaacttcacacatcgttgattctagcgcctcttgtacggttgcgaaaggaacaccgccagctttaaccattttcaaaaatgcactatccggaagaggatatacaatatcaccttctttgaaaatctggatcaattgcataccaccgcgcaacgcatgagaaagagctttccagtcgatcccgttgttggcttctgcttgccgtgctcgttccccgtattcatcccagagtttatacacggattttttcatttccgctacggtgatcgtagactggaatttacgccccagaacttcataaaattcctgacaacctgatttcagtgttttgtctgtaacgaatcgacaaaactcgttggtcgggaatcggttagaaatctcaccaactttgatgcgcttgccgtaattagattcatccacgttacccagcaatgatgtaccataccagtaatcgggaatcatttgtaacacatcaacaacttcacgcagtgcagccaggcgagaacctttaacgccatacttcgccgcttgcttacgaacataaccaaacagaccagttagttccgtagtgtagaagcgtgaacggttagcgcggagatattgccagatatcagagttagcgatcagtttgctatcatctgcatgaagcatatcaatcgccacggtgtcaccatcacatgcgaggctgataaacttttgcagactgtaaatctgacgatctacgtcattaacaccgttctttgagtttttatcgccagttgatgtatcaatagacttcttcgcagtgcctaacaggatttcgcgaggatgagggagatagatccctttgtagtctttatcgcttgttggtgtttccagtccgtacaggtgagaaccgaatacggtttccataatcattttcatcagaattcaacctttaatgtttttgcgatcccgcgcaattcagcggtagtaatatccggaatgtttgttccgtagctattcccaaatacttttttaatcttatcacacaaatcgcggcgatacaccatttctttgtattcttcttcgctacgatacagttgataacccatccacccctcagcccatccggaattgcgcttgattttaatattagtacaacaatcagacccatcttccggtcggaaagatgcatacaggtactgacgcgcaactttttgtacgtaaagggttttggggttgcgattttgtcgctggtcactacggatcccagcatcatacaacgtatcaccaactttcacatcacttaaatcaatcatttacgtctccagcaattagttttttcacagtagtgaacgggaacagacacgcccaacgtttctttactgcttctgttgtatgttatcacaacgaatcggttttcgccacccctaacacactccagatccaaaatctcgcgggttcccttcgtgttaatgtctgcaacataatattcttcgttgttgacaatcactatatccgacataatcaagcgaggtttcatgcagcgtacacctctgattcatcgatccatttcagatcctgattgagtgattcaatcagctttttatcgcgtctggaaataacaacggtagaacctttttctgccttcacgatgatatcaccagaagaggtgatgtattcaaccacataatcacggcgagggcttccgagtctatcaccaactttaacagcacgtctaaccgattcatgagatttttcggtgaacactaattcatcacctacgtgggtaacaataccatcaacagcagaacgagaattaacataaattttgctaatctccgccatgaaaacactatctctcagatatcgagcagccactttatctaaacactgagaagatactttatctccgccaggatatactgagataatcattacatgaccctgaacacgggcggttcctactttatgcagaatgtaaaccattgaaccatcagaatctttagatacaaggatcacgctgaaagattctttgtgttgcttctgagtttctccacaggtaaaactcacgtccagaaaatcaccaactttaacagcacggggttttgctacttgttcacgagcactaataacagggatcataatcatttcctcacagtttcaaattcttcatcagatttccaatatacgttaaaattacgacaatcatgttcggatgtcaacgtatatttttcatttgttttctcatcggtgataaccatagtttcattatcgattgagttaacaccataaacgaaaacattctcaccgcgtttgtttaaaaacgcatcacccttttcaatcaactgccaacaggcaacaggcaacccacctggacaaatcggacgggtaacaagacaatagggatgtttcataataagcctcttttgtttctgtaggcccaatatagcaaaagcccctgaccgaagtcaagggctttgttttaaattccggtaaatgctacgatgatttgataatgatcatcgaagaatagatcccgcatcgcgatcacttcgtgcatcggtagccagaacgcgtctgctgcatcatcagagccgcccataatacgaggtaatgaaccatcgttattaggttcgagcttgatatattgtgctacagtcggttttgagaagtacaccgaacgtttcggatgatcgaacagcatcgaattacggatagaaccacgaataaccttttctggtactttaattcgtacttcttccagcaattcacggatcgcacaatcaaggaacgtttcgttaccgtttttgtgtccacctggaagcgctaacgcatctttaccaggtgcaaacttacgacggattactaacacgtggttattacatacgaccactgaatcagccgtgcaacagttcagagaatccggatacggatattttttgaacttgtcaatctctcgttgccagtgtgcatcttcatgggacaaacgctggaattcttttgtttgtgtccattcatcgataaaggaaaccgtagtgctaggcgcatattttaacaaatcttcgtcccagccttcatgatgttcccagataattttgcgtaaattggtcgaggacagatcctgatctccaaccttcacaggttcaaccggaatatgattccatccgaatgctttaagccagtaagaatctttgtctttttcgtacccgacgatcgcaattcgatcatttcgagtttcatcgattgccatacgaacacgggatttccatttttcctcgttatagaggtaatccggaatgtgcgcgaatttgattctggctgcatcttcaacatcaagtttgcagatagaccagcgagtgatcattgcttgacgctgtttagcggtcaatgggtttaatgtgttcggatatgcataagcagaaccgatcagaatgtaaaccgtatcagcaacagcaagggcttcccttaccattttctcatgaccatagtgaaaaggttgaaaacgtccaattactacagctttatcatatttgtgtttcataacgtgctccacgtttaaaggttaatcataaaacagacgcaattattaaaacaccaaacaatccaccaatgaaaccaaagaatagtgaaatgagtattgtcaatacgatctgttttatgttcattatagtattctcgttttagatgtcaagcccccaaagagggggctttaaaacattatttacgagaatcgaaaatcactttacccgcataatccgaacccattacagtttgaggtacgccacctttatagcgggtagagtagttcatctgtacatccagttctttccagcggatcatttccggtgtaatggtgcgttgcagggcggcgttggcttctgcttctttcttcgctgcatacagacgggcatcagcatcacgttcgttagcgattgcagcgttttcacgcgcctggcgatcggcttccgcttgttttactgcttgtaatgaagtctgttctactttttgcagttcagctttagcagcgttaacctgttcttcgcggatcttcgtgttagttacctgttccatgataacttccggcagggtgatatcctgcaagaatacctgtttcacagtgtaaccgtaaggccgtgcataatcttctacttcctgctgaattgcggtttgcagttggttttggatcttcgcatcaaacaggtcttgcgcttttggtacggatttaccaaattcgcgaacagtggaaagcagtttttcagttacatacttatccagtgcctgatcctgattacccgcgttgatacggttgatcggtgctttgctaccgtcgaattgcagcattacggtcatatccacagtggatttaaatttatcctgggacggaacctgtaatttgtcgaacttcatcgcgatgtctttggtgctgaacgtatcaaacgttgccagcgggtttacaatgtggaaaccaggcagtacgggttttggtgatactttacccatgaaggtttcagttttaaccgtaccgtcttgcacaatggtatacatgttaggcactaaccacagtgctgcgactacgcccagagcgatcagagaggttttcttcgggttgttcacgatagtgtttaagttcatcataatttccataagttgttgttcaattcgatagttattctatcatcacatttcacgctgtcaaactatttttaagaaagttttgtcagcttgtagattgtttgatagcacaagcccttaatctcgtccaggatgttcttcaaagaactatctactgattcgtagatctcgtttgcttcgttggctattttacggagatacgccaccgtgtcaagcacattttcggtttttagcacaggtttgtatcttcccgtgattcctatgtggatttcggtgaatttatcaaccaaatcctgcatatcttcgtaaaaaccctcatatgctttatgttgtgagtatgaacctgttgcaaaatgtgcgctatgcatataggtaacggacataaggcacatgccaataaaggcatctatcttgcttgagttctcagattctgtaatttgtttaaatgattgcatgatgatccctttatgaacgatggatacttgcaaactcatacgcgaccctaatccctagctttgcgcattcggattcagatcggcattgtttttggcgccattttcgttccatgtagttgtagaatagttcgcttgtatttacgctgggagggatcgttgtgatgtatacttgaagggccgcattgatataatcgtcaaattctttctgaaccggacggtcggcggcgtgtgttgtgggtgtcatcatcaacaatccgaacagcacagccattgatatgcgtttaatgttcataacaattactcttttactcatagacccactataggtctactcctgtatatatttatagcaaaaacgaggccgaagcctcgttataatatttttgctgtaaagtcaatcaagtaatgtcataccaacacaaacttctttcgaaagcgcgtattttgttcacgttttctacgttttcatcccaaccgatcacaccagctttcatacgtttcagttcctgacgtaaacgggtacgtacttttgaatcaattttctttactgcaatagaaagcattgcgttcagatcgccatgagctttgttaccgtcgcgacacaaattattatcaaatcgaatgtatgcacatcctgatttgtgtttccagttggttgagtaccaacgtaacccatccggatcaataccatgttgagcataataacgagaatactcttttacttcttcgatcttttcgttagatgaacggtcacgaagaggattgtatttcttacggtaagtgcgactcataatgatctccttttgtttatgcttccactgtatcagggttgttctttagttgcaagtagtgttttcgacaaagtgaaacatatttgtcttctgccccgatctcaatctggtcgccattagcaacaaatttgccattcgcatcaatacgggcaacggtagttgctttctttccacaatgacaaacccctcgcaactccctgatctcatcagccagcgccagcaacatataagaaccttcgaacaagttcaactgaaaatcggttcttagtccataagtcattacgggtatatctaattcgtcaacaacccgacacagatccatgacatttttcctggaaaggaattgcgcttcatccacaaacacgcaagaaaccagtttctcgctatcactgtaaaaatgattgttgtgaacatcataatacaagtccatatcaggcgtgatcatggtgcatgttgcttccaacccaatacgcgaagagatactatgtttaccttctcgcgtatcaattgctggtttgtacatcaggatccgcataccgcgttcctggtagttgtatgcatcagtgagtaaacgagcactcttgccagcattcattgatgcataatgaaaatacagtttagccatttatcctctcaacaaaatctggggtattctggaattttccttccccttcatggtttttgcatgttttgtttgaacagtagatccaccaatcccactcatcataagggggtttggtaatgttcattacgcaaattaaagggaaatgacaatcccgacaacgaactttttctataatgtgtgcgttagccaattgaaaaccatcctttacccatgagtttttcattatgtcgcgcaagatactctttgatttctggcatccggatcgcagtgtcatactcttctttcgtcatggtatgatttgcgcaacccatacacccgcacacctgcgcgttgcaccaacggagtgttccatatgtcgcaatcaccttcattgctttagctttgattttgtcagtcatgattataaccactcatttcgttatcttgtgcttgatgtatatcaagataccacatattgattttacttttcagttcgtccatttccttactcagacaattgtcaacgatacatagaacattaacagtttctttacgctgcataatgttgatgttattcgctttcatcgcttgcgccaatgcattacaggttttaaccagtgcggcgcgttgtcctttgattacggcgatccgtttgttcgctttcttaatctcccgacctgctttgataggatccatcatgattaattcgccttacgaggatcgaaatgaacgacaatgatcgggtaatcaccagtcacctcattaataatgcgcttaatgagttcccagtcgcccccagcgaggccagcaccgattaaaggtgtgatgataggctttccagtcttaacggcgtcagcaagccctacagcctgtttaaaagcattgccgattgcgtcataatcgacacgcggcccaggtgtccagaaatcatattgagtatatgcattgaaaacaatgttgcctttttcgccaatgtaaacagaacaagttccgagcttatcacgggaaccttttaacgtattggcatcaacttgaaatgcaccaggaatacgatcgcggatttcgcgagcaataccagcgcccatattgcaatagcagttgcatccgtggatcaaatggccttcaccgttcagatacatattgacagcattacctttcacttctttaatgatcatttttatttttccgatatagtagggccacaacaaggcccatcaaaatcacaaggatccacaatacagtgaattgaacccctacgctcattttctcgctttccgttcacggcggcgatcttcttgatgacacatatataaaacaccaccaaaaattataaaaccgataacaacgcctataaagtatccagcactaaacatagtcatcatccccgcaatagtaacaaggcccagtgctctcatgcttaccagcattgtacgccaagaacaccacaaccgccgccataataataaaaatccagatagccattagtaaagtcctatgccagcattgaattcgtcaaccaaataagtacggaacttttcgcaccgttccttatttggcgcttgtttgcatagattcatcattggttcagactgcaaaaactctttttgtttcagcaacttaccgcgtttatacaggtgagcattttcctctccccacatataagcaacatctaactgttctgcgatcacttgcttacatactgcgacatctttgatatcacgattgttgcataactcatccaggcgagcatcacccgcgtgagcaaatccagcaaccagagttaaaagcagtgctaactttttcatgatgattccttattcatcctcttcgataggagtataataatgcgcattacagatatacgcaagaacttttttcagagacatatccgagaatgtcggatcctggtttcgtctcatcccactaccagtttcaacagcccaacgtttgttagctggattgtatgtcagccagtaacaatcccattcagacagagtatgttcgaacagatcgaaacgcttacgcccatttgcttgcggcctgacaaaaggttcaaccatttctaaagcggttaaaactcgattaaggtttgaaccgtcttcatccatcgcgatccgcaaacagtattggttaatgtccggatccataccatcgatacccagaccgatagattcgaaaaattttgttgccgcgtgataagacacactggaagaacgatattccaacatcacggggatcttttccccgtccttgacgttgttaatgatatcctgatcgatgagttcaatcaggtctcttttctctttaatcaacgtggaaatttcttcttgcagtggggctatctgtgcatgaagttcttttatccgttgatcaattacggtcacttcgaacgctaagtttctcattgtacccattccccgtttttgtcaatgtacatgatccaatcagcaaccgcccaatgggaagtattgcctttcggagtcgccacgatgtaggaaccagctttaaacagtacgcgtttagtttcgttcaggatcaggtcgctcataatgtattcctcatttaaccaaagtgaatcgtgattcataagcatcgttcgggcgctcatacacagtatccgaacttgtaatgacagtgtacacggtttctttcacaagatccatgattttctgtgattctccccagacattgatactaaaataaatcccatttttaggaataggattgtattccatatcataatacatatccatgagttcacaaatgaacaggcggcgctgttcgttatcatatgtgaaataaatgttaaaacaatcgagagatttactcaaagtaatctctttgataacgatgttgtcttgtttgctaaaatgatcgcggattgcttgcacacaacgcaacaggttagggtaatcatatttttgtgaaacaatgacttgatgtgaaacgctcataatgtattcctctcaattagatgcactcataataaaaaagcccccgaccgaagtcaagggctttttgtcaaatgatttgtttttcttctaacagcttcgcggttgtattaaccatacgagcataatcacgggcttctttctttgtatacttgaaaccagcgttatagctcgcaagcgcctttttcaagtcgcctttgtggtaatcaagccagtactccagttcatagatcgcatacttcgatccaccttgaagagtttcgagctttttgattactacgcgtttaggatatgacttatccattcgtgcgctggcgctccttgcggtaacttgccagcatccataagcgtgatggccttttttacctttaccgacattctcacatgcgcgagactcgatccagacaatagccgctaaatgatagcctaaacgtttagccttatctttttctacaggttttgcagtcttcaaatcatagttgtgtccaactcgataagcatactccaaaacctctttctgcttcggtgtgatattatccaaatccttgatgtaggatggagaatttttgtttgccggaggcttcacagtagccttttgtaaaggcaattgatgagtaggcaaatccgcaatgaaatcccctagcggatccgtcgcagcgttgccagaaaaagagcacaagaaaatgctggcagcaataataattttcttcattttaatacctatgttgcaaaaagagtggcaataatacaccccactttatatttatgcaactattttagatagttttcgcgtcacgtagtttatcgttgataaactcagcaatgttataatttgaaatagcctcgttaggatcgtatagtgcaatgatttcatctaacgataccataacggcatgtttaaagtagacgctccagctagtagtaaggatctcacttttgtcaaatccacaatcagggctgaacaatgcgcggtatttgtacccactgtatttcgtcagacgatttgtgctgtgcgcatcactggtgatcagaaaagtcccctggtgagtttccacgacgaaaaagtatccgaggcgttctttgttgtccagcatcttttcaaacttgcgatcggtttcttcgcgaacaatacgagaagtcagcatttccaacactttatcgtattcgggccaatcattctcgatcacgatcgcatcaaatgggttcttaccattgatcccgcgcccgatttcgattttcgtgcaaatttcgttgaacgttttcaaatcttctggcgtcagttctttaagatcgctcaattttgctacataataacgtttttctagtttcatttatggaaacctcaattcaaaaataatttcacagagttaccacatttgggacatgtgataaattttttcacgacataatcagcagcagagaaaaatccattgtaaatcgattctctcttttgctgtatatcagatagttcatattctaacccacttttacagcaactgcaaacagtaatcagttttgggctatggataacagtaatcatatacacctcacaaaaagggggctttcgcccccatcattagaaattgtcttcgacaaacgccgcgagacgggaacgatacactgtatcaagaatgatatggcttgagtgttcgtattctttcagcttttcaacagcccatacaaacccgttgttaacggcagtgtttcgagggttgtcgatctgcttaatgttcccgcatagtatcagaagtgtgttctctccgcaacgagaaatgatagatttaatttcgtggttgctaaggttttgacattcatcaacaatcagcacagaacctttgcccggatccggatgtccgatactgcgaccacggaagtaatacaggctagggaattgcaccacccctttttcaatcaaaccttcaatgtatttttcagattccggattatccttaaacagaatgttcaggctagtaatacaaggttcgatagaaggccggagtttttcgcccaatgtaccaggaaggaagccgatttcacttgataacgggctatctgacttcacatacatcaagttagcgtaatgtccactattaaccaggtgcatagcaccggaaacagcaagcattgttttaccagaaccagcgccgcccataatggtagcaacatcgatttcattgctcataatggattcaacgaaagccgcttgcagagaatcacggggctggatagctttcatgagtttgcgtttcatagcctgttcgtgcttaacaggtaagacattcaagcaaatctcatcagcagtcaccacacgcccgactaactcaccatttgaggtaatgtactggttaggataaaaatcttcgtcaggaagcgaactgtaagtgatttgggctacattatctgtatatcccaacacttccacagtatcccagaaatcagggatctctacataaccggaatacaatacatcgctatcttttaacgtatcgtcgccagtatactgttctaccttacacccacgggacattgcgatcagcaacatcataatatcgcgagtaactaaggttgcatcctgttgcatacaagtttcaatgattcgttcgtcttgcttgtcaagagcaaacgttttgtttccgacataatcaaccactttaagggtgatagtgtcagacagtgctgggtttgtcaggtttaaaggaatacctgatttcgtaatcgcatcatatgactgaccgaaaataacttttgacagaagccggatcgccaatcgtgcttcgtgcgctgttcgttctttcgttttcaggtgatctaattcacccatagtagcagaggtaataatgatttctgtaccaggttgagtgaatgaatagattgaataggggttactaatcaaaacattggtgtctaatacgtattttgacatacattaaccttatgtggtttcgttaaaaaatgcaccgaaaacctcttttgctttccggttataaacggattttgcttcttctggagtgttatagtaccccaaaaattttcttttttcatctatgtttatctgcgctttgtacttcccattggctttatgataagaaacacctttcaaccctgtactactgtttgagttacatttctttttcatcgcattttgctggttcgtcgctttctgtaaatttcttgctgtatctccattctcaacaccatatacatgatctacgataggaggaagataaccattctcaacgtaaaacactattcggtgtcgcaaatacatagaacctttaaaatgaatttgggaatactcgtttttgcttccggcttcacttccaggagacatagggccgcgctgaactttccaatacactttacctgtagatgtatcaacatctacaaaattcagaagagattcgatcccttgaatctcttcatgtatggttcttgatgaatagccatgacttttcattacatacccagcgaaattacgtgaatatatgctaatggatgtttcttttgtacacaatgcatgagtgtattatacacaatgtccatgcgttcattgcgcgtaagatcacactcatcaaaaataaggtttattgcctggtgctctattcgacgtccacggaaatgattaagaattgcccctttactggtcaatacatcacatccggtagcaccatttagctgtttggcgtcttgtgctgcatttaacgtatgcgctacgtaaatgttaagggaactatgggaacgtttcataaaatcaaacgcgcctttagtcttttgcgtttctctgcccagatccagcctggtttcgaataccataaaatcgttagggccgtaattatgcgttggttcttccaactctcgcataagatgcatcttacgacattcttcaattgtctttacataaaattcactattcatgttttacctttaaggggccaaagcccctttgttacgctaattccacatgcggggcatcaatgaattttgtttcgatcggaaggttcggatcatttttccagttgataccaaaacgcagtttaacacccagttcatcacctgcttgtttaacagcattcaggacaggcaaccacactttagggtttgtttgccagccttgaggcaacacgctaggatacagatccacagcatcacccgtgatgtgttttgagttcattgtttgagatacacccttacggacgttctcgcgctgttgttctacagtacgcagaccttcacgtacaccaaaatcaacaggagacagttgcagagcgcgttctacaactttcaccagttgaggtttaacacctttaaggttgttaaggcttttttgactgaatttaaacataaatcacctcttgtaaaaataccctgtttgggtacacagggtatttatggtttaagaggttcgataattaataatcgtaaagatcaccgaagcattcttcaaattcacgtttacgtttcatctgttcttcttttcgctctttcatatcaggaggaagacggtcttcattgacttcatcaatgtaagcctgtgcatcctctttggtcaggaagaaagcatggaagttatatccgttgcgcccattcatactacggtcttcaagagagaactctgtgtgacagtcccagtctttgtacatggtgatgcatttagcaaacagcccaataccgcgatgcatatacgggaatccagtaacaatcatcttgctacccatttcagccttttcgccattcacacaaaatacttcatacatgatcgcgcctggtttaacatctttcttaacagcacgtttttcaaaagcacttttcataatatattcctctcaattggtgtaactacagactactggtttattttctggatgtcaacaaggtttatcgttttttgacggaaaagttagagtgaacaaacgatcgtgaaggttgtctatccgttcacacgcctgtttcagtatggttttatcaccatcatttgttgtttcaatgcatccaagttcatcggcgtcaatgttcactacatcgctcatcaatgaagcaaacacgttagcatcaggatgtaacagttcttctatttcggccttcatgccgtcgtgttcagaaaggatatcaataatatcgcgggttaaatctccctggtacgggaaccctgtttctaaatggttaatgatcctttgtgctttcgtaatcataattttacctacaaaaaagcccctttcggggctagttaattagagttcacagcaacggcacacaccgtattttgtaaatggagcatcaccgctaacgtaggcccagaaatcacatgcttcttcggcagtatcgaagattgcagcatcatagaacccgtgggcttcgttaccgttctcatcgatgaaaaccggagtccagatattaggattgaagcaatcaacaacaacaacccaaccttctttagctttcattgcttctttgttggcttcgatgtgagctaagatttcgttcataatgtccatttttctctcctaaagtttgtttcgtttcgacatggctatagtctcataaccccgtatctacgtcaacacttatttgaagcgaattgtgctatttttgaaaaatagtccagagcacacagcaccttcaattttcacccctgtagggcttttagcaacgaaccctgttgcgtaggtgtctttctcatcacatgcgaaccaggcgtggcctgtgtacgtgatatcgctaaacccgttagcagtcagaatacgttcggcttctttctcatcggtgcatccggattgtgctaaaacgacaataacgactaacaccaaagcaataatatatttcatgttaaactctttttaagttggttttactggcttcaatccagtacacgggatcagaatagttaccgcacatacccagtaacacagttgtacatcctaaatgatcggaaggtctcaatccatcaggatgaaaaggcaattcgttaacaccaatactggtagcaaaaagagcacctccagtactgtaaaatgttttgatatggtcgtatgcatcatcaggccactgaaaacgataagttttattgtcaatggttactgtatacatatcatattccgtaaacaacggatcttttccttgtgttgccccatacagagcgccgcgccattcaaccagatttgcttcaatgtcgcttacacaaatttcgttacccatacgcaaatcatgaaggatcccttcaatggtacgaatggccccactaagttcattagttaacatagagtttcctttaaatcggtttaatggttttcaggtgtagtttagcataaaaagaaccaaatgagttaccattatgatcaaatttatagttttcactcttccagtatttccccgatttcatcaggggaacacgcttcttacctgctgttatcgtttcaaccattccggtatgagtaaatgtcatgatataccctcttctttcagcacttcccagatcagtttatcaaggtgcatcaggttccacataaccgaatcataagaacccagtgagcgggagtaaatcactccccatgaacgataacttttctggaatgcttctgcactatctacatcatacggcatatcatcaccggatgcaatcaaaagtttaaggatcatcagactgttcagaagttttgaactagcgtcttgtgcttgtacttttgcacaataattttcaataatcgcttttgcctttggttcggtgatgcgtccatttttgcatcgctctttgtacacatacataagttcatcgattatttcttgcatataacgcctcccgttctactgctgataacccgcgaatgtagttctgtgattctctatgcgcatctgctacagcgcgtcctgctcgttccgacgccagtatataagtaacaacttcattacgaatgtgccataggtaatccatcattacaagatcttcttctgtatgaaaacctttaatgtcacactcgcagcaaatagcgtctctttccgatagtgccagttgcgcggattgcgcgttgattggcatcatactgtacttgtcgatcaaactatccaacgttcgcggtttcacaataccaactgttacaggaacaggacgaagagtaggtttatccgaataaatcatagtattcctcttcatcaagtctagatgtcagtttagcgataaagtcgaaaatgtgttgtgaaccatcttcaacataatgacggtatgcaagcaaagttgatacgtgacacatatcgaccgattcaactttgatgcttgatgcgatcattgtatcatcatttccatatccgtcaatatcacggagtaccatttcttcagtcgggaaacgctgaaggagtgacgcttcccgatctgataccagagcaactaagcgattatgtcgcgtgttgtacgataatattttcatttcaattccaccgcgtaaacatcaggttcaggggctttgtgtacgcgcatatctttaccgcataccgcataagccggacagttacgacaaccgttatgatccttattaccgatcagttcattacggaactgtttggttttcggatgttcccagatatccttaatgaaatcgttcgcttccaggacattcaaaccttcttcccaaccaccttcaacccagcgttcggtaaacgaacaagggaagaactcgcctttctcgttaatgtacgagctaaacatcgtcgcttcacagtcttcggcgtattgcttgtactgttcgaagttcgggtgtccctccatcgcttcaacgaaagcgggggctgaacagctatcgaatccaaatcctacaccagaatcgaggcaatattcaacaagctttttatattgttcgcgggtaacggtgtcccagttcttaccgcgtcctttttgtttcagtcccaggaacacgatcgcgttgacttctttcaggcgcggatcattcttcacggcatcaaccacgttaaacgcatcatcataggttttcgagctaaccatgaagtgcaggttgatttgctgttgtccggcttctgtcaggttcgctaccgagtcgaaagcgacatcaaagccagcgtgtttataaaccgataccgcaacagccccagcaaccgccgctaaacgcgctgcaacgtcttttgatacatcagcaatggtaaggttcggcacaatgcctttagaacgcgcataggccatcatatagaacatatcggggtttgtttgcccctgtgcatcagcaccgagggcgcattgagtcagccagggcattttgtcgatgattttggtgaaggtggcaagatccatgttgaacccgttagggttattagacttgtagcagaaaccgcaaagtttaccagcagggccattgcatttagttgtgatctcgatatcgaggataaaaggaaaatgactataaataggatcgtcagcaggagtttttccccaagtcatcatatgacctgttttcatatcaaaattaaaattaacctcttcggaacgatagattttctttcctttcgcttccagtagaagtccaacaggcgttttgatatgtttggcgtttactttaacgtgtctcataggaacctcataatgtattacgtttacagaatcacaaatgttatagagaacaagcactattatggatcaagaaaacctaaaaagtcaatgcttgcttccgacgatttagggaaacactatttcagtagttcccgtgatagtcatttcatccaagatcagaaggaaaatccaggacactacaaatataaagtaatcgtatctgggttgtcaagggaaaaggcgatgaaacttgagaaaaggttacacgaaatctataaggtagacaagaacccacatttttataacaaacacatacataacagtgttgatttttcatgtacaccagaaacaggaaagaagatttcgcaaacacaccagaaatatgcagcaaagaaaatttcagaatcacataaaaggcgattcaaggaaggtatagcatcacataaaggagagaacaacccacgatacaacgatcatcggtcttataaagagatacacggagaagaaaaagcggatactatacgcaaagcacaatctgaatcaagaagaggaaaaggtaattcccgcgcggttacgtggaaatttacttcccctaatggagaagaatttttagttgaaggagaatgtaaaaagttttgcaaagacagaaatatttccatgcgtaaactgaaaacctatctgggtgaagtcatcacaacatgcgataaaccctacgatatctctaagaataccgtaggatggaaattagaaaagattagttgaatcttcttttacgttcgtcagccagttcttttttgtacagtttaatgtacttcccgttaaggatgcgaagctgttggaaaactttgttgcacaaagcacgtttcgctttgtattccggtgtattgcggattgattcgatcgtcatccccatttcatttttagggtacgcgctcaactccctgccgatctctctgtgccagttgcttaactgatcacgctgtgctttgtactcttcaaaagttaacataacaatctccggtttcgtttctatgtgtgtaaggtatcattaccctacacacaacgcaagcgattttattttccgtaaagaacacaatattctttatatttttcacgggctttttcttcattactaaaggaaactcccgttccaaaatcagaaccttcgaacgtaacatcccacgattcatacccatcttccgaataataggaaagtgttattttacgatcttcaagaacaagttgttcaacaacaatatcaatttcagtagtcatagttcatttccataatcttttgctgcatcttcgggggttgcattcagtctgtaaagctcaacagctaacggactgggttttatttcgcggttcaggatctcactgataccgcgaaggaattctatataaggacggaatctcatttgatacgtaccgcgttaaaagcctggttgcgcagttcataagcctgttcaagctgttcagtagtgaacagaggactatcagtgttagtggtgaaactgcaaatggttttgttgtcggcgttgacttcttcgacaacgatttcataaccccagatcccgctatactcacatttcacgttccggtacttgatgtaaaccgcagcaacatcttcttttttgtagttccggcttttgtagatgatttccatgatatcctccttcgtttcgatgtgtgtaatataacagaacagggttatcgagttttagcaattcgtgctaattataccattttcttagcgattttccaggaggctttgaacgccggaacatcttcaatatcaacccagaaaccagatccgaaaccatcactatagcaagggcaaccgtcgcagtagttttcccaggtcatcacttcaccaccaacagaagcaccagtttccatagcacgtaatgcatcttcaaccttttccagtttttcggcgttgtcgtcgtaaatgacaaagtaccatttacctttgtattcgttaccaagtttgatagcttcgcgaacaagtttcatgatgatttcctttttgtctgtttcgtttctatgtgtgtaatataacaaaaccccttgccattggcaaggggtttctttaacaaaaagtgctattaccatccgttagggttgcggaaatgtgtctgccagtaacgcagttgttcgcggctcatttgctgggtgtcaattaccatgctatgaatcatttctaacataacacgggtttgtgcgacatcctccaggctcgctatacgctgttttaaggcttcgttctctttctccaactcaaccatacggtcgtatgctttgatgcgctccagtggcatatcagggcgctctttgaggacacgggcgcgggacacttcacattcatgattcgctttccagtgttcagcctctttgacggctttttgttcgttatgacgtgacatagaaaggtcactaaccagatccataacagtttgcggatctacggtttcaaggtaattccccagatccgtttcccatcctttaacctgtgtcggactatcaccataaggaactacatactgaaatacacgtttatattctttcccactgaatccgtaatcttgattaccgcgaatagaaccattatcagcagcagtccatttagaacccatcatgtaagagactttacgcgccgcctcagcaatagcgccaattttcgtatcttctaatttcatttcatatcccataattcatattgtgcgcgaaggatagcgtaaaggctaccgatatggattgtgtctaccggacactggaaaagatccccgcgcatcatgttaaactcgatatcgttacgttcaacatagttaccgatcattgatgtccaacccatcaccaggttataaccatcttctgataacccataagccagcctaaccatgatacaacgcttatcagccagttctacgcgcatatgggtactggtatgagtgaccttgttcgggaatctgcgaaacattttagtaaggagtttggcggtttcaatattgaacgccagttcttgatccttactggtctggttgtcatgacggcgattcagatacttttccatttttgggttgagattcacatgttgcataatatattcctcacaggtttaaagcgttcttttccggttccattacatgaactgcatttcggagatcggtcgctatcatatcgcccagatccattacatgcaacacatttccgtaatttccagccatacacgaaccgcatataataatcggttcgtgcggccttgcgttcgtggaagttcatactttgttgtaaacctgaaccagccacatttcgatgttcggcgcgtaagtaacgtttaccatcggcatagtgcggtatttgtaagcggctttgtacgcatcgagttcagtcggaacacagaaagagaaaccgttgtcataacgttctgcgttagaaacttcacaaccaactacagcggcaatgtttttgttcatgttcatgatgttttcctttctctgtttcgtttcgatgtgtgtaatataacaaagcccttgcattgctgcaagggctttttttcactttaatcgaatttttctggcaactgatctacaattacctgagtttgatggatttcttcactcaatttatcgcggtaatgaaccagttcacgggttctggatgctgaatagctaatgattttatcagcggtagcggtgtaaccgtaaccagcacacgcgatttccagttttgcgttatcgccgttaggtacgcggatatgagcatacgccagcaagtttttaaccgcttgcaacagttcatgatcttctttgccgatgataaactggtttggttctgctgaatccatatacagttcttcgtctttgttcattttgcagccttatacatttccaggacgcggttcatgtgatcttgagattgaggcacacccgcgaagttcagtttgatgaagaattccagacgatcctttttggtgcattcatccagccccagggcaggtaatgaaatgttttcaaaggctcgttgttcgtgtcgtggtatttcgtcccagaacaaacgggaaccgtccggcataggaatcccaatttcaccttcgtagactttgataatcgtcgtcaggcgttgtttgccgtcgatcacttctacccaatgggtttcgttgaactgactatcaaccgcgatcgcaatgataccgcaagggaaaccactgatcagggtagtcagaaacgcatcttgctctttctgcgtccacacataggggcgctggtaagatggattcagatccagatctttattcttccaccaatgcagataactcccaaccatgatcgcgtgatcgcgactgcgaaaagttaactgatcgcggatacggttatgaaccggaatatcatctttagacatgattcaccacccagcccaacaaaccagtattgatagccgcaacggtaaggcaaatcaccgccaacacccgcgcgttatgaactttggttttcagttctgcgatctcctgatcattttcactttcgaactcttcacgggttccatagtaaccaggatcagcagcggttgccggacgtactgcatctttttcaacgatggttgcataaccactcgttactttcgttgcgccgtaccagtcacctcgatcgttgttgatgatcaggtgatcacccttcgcgttatgctttgatttaccaataacaactacacgttcaccattcataatatatcactctttcacgttttgttgtaggaactttaacagctttccttcggcctgtaaagcataaagtttattcagctttgcaatattttcaaagtctgatttttcgctgaacgaccaaacaccatcatcggaaaccagcgcaccaaccgatacgccagtttcaggatcacgcgtcaacgccagccccaggggatgcaggatatctttattgattttccagatcagccccaattgagataaggtgttgaaatcaacgtgactcattaggcaatgacccgaaagacaacagacccatacgatgatcgttatctgcttcaccaatgtcaaattcaaattcttcaccgctgatactgatagcgcggaaaccgtctttcaggtatggcaacagatacagagggatcagcatcatgtttgaatcgtcgctccacttacggaagcccagatttttcatttcttccagcgtcaaatcattcggatcgacgggttcgaaatcaggggaagcgtaaaggcgtccaggcagatcgcgaatatttttcacggtgaatgaatcaccccaggactgatacacggtaggttcagcggcgcgggttgcggtagccaggaggatcatttgacagatttgaaaagttgttgctttcatgatgtatatcccacaagtttagatagaagttgtcccatagtcttacgcgcatgatcgcggatttggctatacggaacatatttgaaaccgtccatttctgtgatggttcgcccgttcttaacgaacgttgacatacagatacacttatcggcttctgggtaattattacctttatacacgaataagtaaagctcttttttactggtgtaatccagtcttccgaggctttccagttcgtgcgggagaacaagaactccggtttcttcgaagcactcacggatcgcagcttgaataggttcttcgcctttttcgatatgcccctttgggatgtcccaatgaggcgtttcggttgcgtgacccattaaaacgctgccgttattcaggaagagaataccagcagaccgttccattattttgccccgaacttgcgatcgtatgctgcaagcgctttatctgctgcatcaacagcctgggtgtgtttgttagcggatttctcgctaaacacttcgcggtaaatggcaacccagagagatcggcgggtgtgttcgctttcttcattgacgcgagaagccgcaaaagcgttatgttctttgatcatttgtgccagttgcacatcgtgattgttttgttgaatagcgctagaagtcataattcacctatttctttcagttcagttttgagtttttcgagagtcgattggtactgaatgccgttttctgggtttgacagacgggcataatacagcgtaccagttttgttgatgtctgacaacacctcttgatcgagggtagccggatcaataccgaaagccattttaaacatggtttccgcgtctggggcgaatccgtgagagaatgcaaaccccagctttttatcaaactgcatcagggatactttgttacccattgatatcttattccccataatgttcttcgtaatcctcgcattctgggagataggtttcgcagaacatacacagcgtgaagaatgtaggctggcgaataccgatattatcgggcagatacatccagaacgtgttagcaaacacgatgaacgttttcaggttttcaacggttacggtactgataccatcataaccggattgagcaattgcgcgttccaggggaacagggtattgctcgcagtagttggcgtaatgttcgcttgtcaccagcgcattagccgcttttacgagatcggtaattttcatgctttcacatattccactttgacaggttttgcgataaggcgatctgtagtgaagccttgcccgttacagatatcacaagtaacattgaagtcttccatctggtcaacccagcctgaatccggtaagccggacggataggtattgacgcgtttgacttcaaaccctttgccctcgcatttcgggcatttgtgcggatactgggatttaaccatactcagcagttgtcccagcgtggtcgaacgatcgaaacgttcaacaagtgccattacatcggcaattctgatagaaccagcatcaataactgtatacaggtttttcggtacatttgagcgcatcatatatttctcacttaaagaattttttgatgaaagagaggaacaagccaccaccgaacatgatccagtatcccgcgccgtcaccgttaaataggacatacacagcgacaccatagcaaaagatttccgcgatattcagtaagtttctcataactccctcctttgtctacaccaggtattttaccagaaagtagattactgtcaataacaaagttttatcaacccacttatcaccagtcattagtaatcccctacaggttgagaagatgcaacgctcaggatcttgaaagtgcaattgttccactcacaatacttttttgcacagtgaacacttcctttcataacaaacccgtttgagaaaattaaccagtaaagtttcatgatagcctcctttgtttcgacaaggccaatatagcaaagcccctgcacgaatgcaagggcttttttcagtttttcaacatccaaagttgcggaggacaatctttagaagcgattagacgatccaggcgggacataacccgacgataaccgtcatattcaaaattgatttttggtggaacgtagtttacctggattgtttttctgttagctaaagaaacatactcagggatcactgttcgcaaccgtatagctatgactggcttctcttcgccttcgttaaagaacatttgaacagtgataggacaggcaaaaattttaccatttacccgacgataaacaataacttcctgtgtcccttctgttttggccttcacagcgtaggttagaacataacacgaataatgatttgctagactcatcatgatatcgcgataagtttcaatatcttttttaatcgatactgaacggtctttaaagcgatctgaaatgtggtcagcagtagccgctaccttgattgtataccagtcacctaacgcgctagtaaacgcctcgctaacttcttttcgtacactgttaacaagatacattaaacgtgttctgttcatataatcctcactgatttttgaagtattcgatctgacgcaaacgcttttcagcggcggctttcgaattgtattcaccaagttcttttgtgcgatcgtgattcaaaacaacccacttatcgccacgctgttcaatgtgttctgtaatatcttttaacgacttatccagatccagtgattcagcctcttcacagataatagtcaaatccacgggcagtgtcaacaaccttttcactccgctgatatcatcaagcatcgaatcgtatgcaagggttacgtgcggcttgtaatccggataatcgtatgttgcgccagcatcaatagaatctttgaaacggctatgcaggtattcagattccaggatccctacaatagtgctaccgtattttgtgtcccacttttcaacatcaaccagtttagcaggttctgtgatgtcctgttgcgggaacaaatcaaccgttttccggctgtatacgatcgttgtatgcatcttttcggctgaaacagcattctttgtgatacctaatgtcttttgaacatttttcaaagcctcacatgaagcctgatcgaatttagcacacatgtagataccaggatctacaacaggttttgtgatttcaagaaatgatttcataaaacaccccaataaaaaaggggccgtagcccctttgtaataaatttgtttttacgcttcttcgccaaaggcggcttcatcttccgcgactttttcgacttcaacggaagggatcagagcggataccgcgccaattaccgcttctggggttactggctggcttgcgtcaatacccagtaccgaacacaggtcggacagaagttgacgatgaacagagagttcactttctttttgcgcgataacttcgttcagatcgaatgcgcggcctttcagtaccagtacttcattttgcagtttttgaatatcagacattttattacccattgttaaaatttaaaagtatcgagcactttgctctttagttgtttcaaagtaccttcgttagtgatgatactatctccaggttgaggtgtcaaacctttttccgtggaatgttcatcaacaattccggtatcctttacaataaacacaaacttagcacctaagcgttttaggtatttgtattcgtgttcttgacgacagtcagtgaccagaagatggttgtattcgtcaccagtatatttattgacgaatctttccaacgtgtaacgaacccaaaccgtgttatcatacttgcatacgatatcagttccaaacacttgcatcaagcgtctgatactccagggagtatcgttactcataatcaggttatcaatatcatcaggactataaacaatattgtatccacgttctttgaggatttcaagcccgattttgaaaatatttagaacatcttcattagacatcacaagaggtttctctcgatcgcctttgtaaaaaatagcatccggatcagaatattgtccttcaatcatattgcgaatgtatggtttatcgtaaccatatcgctgcattgctattcttagcgttcttttgataccaaatgccagtgcttcacactgaacatcattgtacgcctcttgaataaatttagcaaccgtatctttaccagttcgcttttttccactaatcacataaatcattagctcattctcttttgagaagtgactacttttccgtcaatttcaacttccatatgaaggaagccaaaagttgccatacacgtaaccgcttcatcactatcgttagtataacccaattcaacctcacccaagtttgttgggaaggcaccataaaatctaaatgtggcgatcgttttcatctgggagttatccaggatatgcacagcgaatgattgcttaggatcatcccacgcaacagagttaaactcattgtaatcgtttgtgctcaacatccatatgtaaatcccaagatacgatctcatttcctcatcgactacaaagcggatcatcaaaggatcaaactcaaaagccgaaccaggtactttacctcgaaccatcatatttgcaggaatatcaactgctgggaggttcattgatggtagtgtaaccccttgaacttgtaaagtcaaacctttcatgtaactgttatcaggaatatcaacccgaaagtttgtaggtgagatttggtttaaaatcatttctgtagacataggatctcctttcctctatttagcggggaacgggatcaaagcggcctgacggggtaatataaaaatttgaaaaaatgcttgaccttttaaaatctttgatctataataattattaattaaaattttatcaaaaagatctaacaagatcaagtaaaatttaataaataatttatcaaaaatttttagatctgatcttgaattcataaattttatgatctataatatattaatattttattttatcataaatttttatgaagatcaataattagatctaataaattttatgctttttctgaaaacttttcctttaccccgtcactaaatactggtactatgttcccatattggaaatcaggaaaaacaaaatgactcacttgaaaaaattcaaagaatttctgaccgaaggtaaaaccctcgctcgtaccgtagcacgtggtcaacgcgctaaaacttccgataaacattcaatcggttttcttcacttcaaacatggttctgatttcgaagttttagcaccggattctcacgatctggcatacttcggtaaaaacattgtacgtttgaaaggtatgactactggtaaagttcaagcggcttatgtcgattgggctaaaggtactgtttctttctacagtggcaatccggatgatgatctggatttcgacaaaccagaaaaattcaaagctgctactctgtatgaagaggcggaagaaaatctggatctgtataaccagttagcagaagatttcgaaatcgagatccctatggatgaagctctggtgaaaggtaaagtttacaaactcccaagcaacgatatgcgtcttctgtacactgggcgttctaaaactaaagcaagcggtgaatatgcagtgtttaccgtagtcgatgcttccggcaaacctcgcctggtatctggtaaaaaattcacccaggaatataaaggcgatatggtttctaaactagttctggttgaatccgaagatctgaatgaagcggctaaaggcattcgcgaaaaagttattgctgtgatggtgaaacgcgggtttaacgaaaaagatgcagaaaagatggttgacaaaaacctgaaagatgctatgaaagttagacctggtgcgacccctggcaaacttgcagaaatagttagcatcctgtaaaaataaagccccttcctttcggttggggctttttgattagtatttgctccagacttttttcgcgccgtaaggtttccctttggacataaattgctgagtcggtagccaaacagctttcgcccaatctttaggggcaatctctgctaatggtgatttgaggtgtgatggtagatatgctttgatcatttctgttgcgcctcgcatacctttcacgttaccccagttaattttgagtacagtcttgttagagaggcgtttagtggatccgtaccctcgcttcaataactcttctaaaaactcctgtcgtgctctgggtggcgcatagtgcaagttcaaaccatagaacactaagttacccgctttcgatcttccggatcctaagaaaatgatcagtggaaatctatcccaatacggcagggtgtctttatattttgcatcatatgcaaacgtgtacaggcgacccgttgctggttttgccacacggtgtgttttgatactggttttgatgaaattaccaaaccattctgttgaatctttctgtcgctttgccgctgatacaccaacagtgatctttttcagactattacggaaatcgttgatgatctcgatcccgtgttttttacggtagtcattacgttttttacgggcttctgtctctgcggaacgtcgttcaatctcatcatcaatctgttttttgtaacgatgcattgactttgtgaacgttgcgtagtttaatccctcagaatcggcaaaacgtttagcagaaacacctttcgttcttgccttacggaatttgatccccagttcaacccaatcactcaatttgcgtttgggtggtgctttgggtttatcctcttccgcgatgatctcaaactcaaaaataaaactcatgtttccctccagggattactgacctcgccacccaaaaacttttttgagtgattcttctgttacgattttgaactgccagcctttttgacggcatagctcatttgcggctttccacttatcaatattaactgtataggtgtaaagagcatcaataaatttctttttattgtgtacgttgttgtttactggcttcggtggaggcatggtttctttaaggggcttaacctcccaaagatatgtagtaccattttccatttccacatagaaatccatgtaatagcgtcttctcttaccgtctgcattgcagaaatacgggatcactatacattcagaattccaacgttttacgtgtgggtttttatccagccacttcataacgtagcgctcccacgatgacctatacgtaatctttcgcggatcgcctttatacttctgtatgttttcgggtacaaacgaccctttatacgtctgtcttccagccattgcgtaaatcctaaatagaataatataacgtttagataggggaacttatcgtgctattttcatacttcccgcctgttgattacaaaggcacccagacaactgatattttccgagactatcgattttattttaatcgtgtgattggaaaatataaaacccgtagttaccagataacaggcacactacgacctgaacaacttgcagaatcattatatggaaaccagcaatactactggatcctgttgatgcttaactctgtttatgaccctttctatggttggatctccgatcaggaagccgcgtatcagtgcgctatacagcgttattctgaggttggcggtgaacaggttctgtatcacgtagatgaaaacaacaacaagtattataaccttgtcgaagaccccaataaccctggtcattggtatgacaaaggtgacaaaccaatgctgtatttacagtatcaaggtgtattagctcctgtagatatttatgaagatgcagtgttgcaaaatgaagcaaaacgaacaataaaaatcattagtccgtctgacatccaggcgtttctgaatgattttattaaagaaatggaaaaggctaactcatgaaattaggcggaaatttacactcacctttctttgatggggtggttgaaaacgttgatgatccgcgcgggttgggccgtgttcaagtccgtgtatttggacaacacccagcccaaaaacaaaaatccgatgcaatcggtgttcctgttgaagatttaccctggatgatgcctattcaggatattagaagcgctgcgatctctggtgtgggcttctctccaactggtatcactcgcggatcctttgttgttggttattggcgtgacaaatggcaccaagatggtatgataattggtactgtcgctggtgaatatgtcgaacaaccagacacacagaaaggtttttgcgatcctatgggtgaataccctcgctatgttggtaacgatgttaactcccttgcattaggtggtttgaaaggcaaaggatcatcaagtgtcatcattcgtgattcaaacacaagcatagcagtaaacccagacgatcgcccactggatgagataccagaagataaccgccctgatacgggtggatttacgatcgaaaagatgctcaagcaggatgaggggatccgtacacgatggtatacagacagtgaaggatatccgacaatcgggatcgggcatttgcttatccgtgaaaagactcgcgacactgcaaaaattaacgctgcgatcagtaaagcggtaggtcgagaagtaacaaacggaacaatcacggcagaagaggtatcaaccttatttgctcaagatttagccaaagtaagatctgatattcagagaaccgctaacgtccgtgaagtgtatgtgaacctcaaccgtcctcgtcaaatggcgatcgaaaacatgtcgtttcaaatgggcgtcggtggtgttgctaaattcaccaataccctgaaagcgatgaaaaatgaagattggcaagcggcttataatggtcttcgaaattcactgtgggctagtcaaactccaggccgttcttctcgcgtgtctaaaatcgtcctcacgggcaaccttgaatcatatggggtacaagtaccagatccggaagggcgctctctgagtgctgcttacgctgcgtataacggtgctacattgttggctgctagtccggaagatccgtttactcctggtgatacccgtgtgatgtttgaagaaccagcatcatcttataatgcggaatatccgtataacatggtgtttgaatcgagatccggacacattcaggaattcgatgataccccaggatacgaacgatataaccgtgttcacccagcagggagttacgaagaaattcgcccggatggaacccgcgttgttaaaatcgtaggggatgattatcaaattgtgatgcagggccggaaactcaatgttaaaggcaacttgcaggtagttattgaaggcgacgcattcatttacaacatgggtaacgttcaacaaacggttgatggtaacgtaactgagtttgttcgtggcaacgttcaacaaactgttgaaggtgagtacgttggcctgattaaaggtaacgctgaactaactgtaaacaaagatgcaacagttaacgttgatcagaatcttaccgcaaatgtgaaacagaatgcaaccgtagctgtaacagaagacgcaacgatcactgcaaaaaatgcgaaaatggagattgaagaaacgatggatatcggtgctaaagatatcaatatcaaagcaacgaataacacgtttattgattctggcgcattaacaaaaatcactggcggcaccgtccaagtggggtaattaaatgattatggattatgaatcaataattgatggaattatgcaaaattatcagcatccttgtgatgctgagatccccgctggctattatcggcgggttatctggcaagggcatacagaaaattatccggctgttggggttgagtgggataccgagataatcaaaatcggtactcatctttatactcaagaaccgttcggacatagaagcacggatctacctgttgtcaattcaccgggaacagatccaaataccggacaaccaacagggatccttgttccgaagattggctattatttcaacactcaagcagagattgatgcttacattacatccatcggtgcaactaaaatcaatggtggtaatgattggtacggcgcggatctgtcaaaatcaaacctatacaaaaaccctggcgaactggctatgtataaggttgaaaacagtggcgggtatctttccggaacaaaccctgtatgtgatgctcgcatacgtcaggcgtataatcaggacactggcgcattcaccaatattgattattattggaatggtaatcgtatagcatatatgaagcatgacgaaacaggggcgcaccagtgcaaatatacgggtatgcaggttaacaccaacgcagatacaagcattcctcctgttcctcctgcaatgccttccacttatggagcattaccgagtgaattaagccgtgctgatatttcgtgcattccggcaactgttggtttcgcatatacaaatatcagtgatgctatgttacaggcatggaacgaaacccgtaatacgttcaagctacagtttaacatgttaacgggtgctgtacagaatggattcgggatcgcgacgatgtttgatggtttatccgtatcgatggaagaagtaatggcgggggcgctcgcattgtcacagcaagcatggcaaactgctatgaaagttttcagacaagtgattagcgctgcgtttaacattatcggtggtgcatggggattgattaatcagttcttgcctcaagtaaccatcttaggtgttgcgatcaacatttacgatctggtgtttggtgataattctgttcagactttgaaagatgcatttaatgcaatcatcaaatccggacaacaaacatatgaaaccgtcataaacgcaatatacggggccataggaagcgcatacaattactctgtggaatatgtcaaagctggcgctcgcgaccttgtggatgcgtgtagcgcgttatttgattggtgtttaacgatgttccaaaacggttgcgttgcattaatcgacttatacggtcggatcatgcaaacatgggctatccctccggaagttccaaacccgttatggtctgcggtgctggctatccgtaacatcatgatgcaaatcaaaccacttgatataattctgggcggtaacttccctggatttactgcaatggatttatatcaacaagcacaggaaaaagtcaaggcttttgttgatgagtcatacgaacagatccgagggctttatgaacaagggcaggaactttacaaaacgttaaaaaatcagattttcgaacgtgatgcaattcagagaaaattcaaccagtacttaaactggatgtggggcgctgtaacagacgaagcaacagcggcttatcaatctgcattggatgttgcaaacgctgctgtagctgcaacacaggccgcgtatgacgctatacaggaacagattggatctctacaagatgcaatgaaagatacatacagtatggcgatggaagaattaaagaaattgcctttgatgagtacaataaacgagtttttaggcttctgtggtgtcgcatttgacgatcttctcaagtcatatgaaaatgcgattactggtgctcagtctctgtacaaaaatttcattgatagttcgcgctcgtttaaagatcactgcaaagtaatctacaaccaaatttgtacgctggcgttgagtaaagtcacacaatatgtgaataaattgctgtctctcataggattagcaatcaactttggttcgattagtgtatgtgttccagtactgaaatactaaatagtcgaatgatcaagaggaatttataataatggctactgctaagactaagactgtcaaaaaacagattaaccaaatccccgatatttttatcgggggtactttcgaagaaattaaaacagatctgatcgattggctgggtggacaagaagagtttaaggattacgatttttccggctcacgaatgaacgtactgatcgaccttctgtcgtatgctactctttatattcagcagatgggtaacacggctctatttgaatcgtttattcgcacggctgcattgcgtagttctgttgtacagtctgctcaagaactgggatatatgccagattctcgcacggctgcaagcacagcagtaatgattacggctgctaacccactgaccccaacatcgatccgtatcccgcgcggtacaaaattcatcggtactgtaaagaatacagacagttattcttttgttgtatcagatgacgttgttatcgttcgtgatagtaataacaactatacatcaatgctgaacctggtgcaaggccgtttagttcgtactgaactaatttatgacggttcgagtatcctgatccgagatccaaacattgaccgtagtcaggtacgtttaactgtaaacggcgcacaatgggaagactggacaaacgaaagcattgtaaacgcaacaggcgcaagcacgatttactacatgcgtgaaactgttgatggacataccgaagtttatttcggtgaaggtgaagcaagtcaacaagtggcgggtggtgcattaaccgctgaatatatcgggggcttgaaacctgctaatggatcgactatcgttattgaatacctgtcaaccgatggggaagcggctaacggtgcaaaagattttatctatgtcgatacattaaccaatattagcatcactaacatcgaagaaaacccgactaaatcccctgattatgtcggtgctgatggtggtggtgacccggaagatatcgagcgtattcgagaactagcccctgttatgcgtgaaacacaacgccgttgtgtaactgcatcggattatgaatccttcctgtctcacaggtttggatctatcatccaggcggtacagtgctttactgataacgaaaaacctggttatgctttcatttctgttaaaccaaagtcaggtttacgcctaacatcggtacagaaagaagatatgcaaacgtatctttcgaaatataacctcgcgacgatcaccccgtcgattatggatcctaactatctgtatattgtgcaatctgtaaaagtaacgtatgatatcagtaagttgacggaatcagaggaatggttacgcggtcaggttatttcgtcgatcgactcttactatactgacaacgttgaaattttcaacaaatcgttcagtgtatctaagatgttgacttatgtcgatcagtctgatacttctattatcggttcggaagcagatattaaattgctccgtgaaattgacaactattacagtgctcctatgtctgggatccatttcttgaaccaggtggaatcgaaatcaatcatttccagtacgttcaagttcaccaacgaagaagacgaaagttatgttgttcgttatgcttctacggaaatggatcaggatggtaacgcaaaaattgtaataggcccgttcaaggatggggatatttcgatcgctgcttatacaggtgatgactttgaaaaattaacagatgcaggaacccgtaataaatattacgaagtaggatcggtgtctcattataccgatttcattagctttgatctgggcgttctgaacgtatccgccgatagtttcagtgctgcttatatcgagctaaccgcaaagcctctcgaagaaaccatttttactcgcgatggatcgttgatcgtgtttgaaaatgacctacgtcctcaatacaccacattgactatgaatcctatcagtcaataatcgttaacccctgtcttcggataggggtttttctttttataaatacgtgatatacataaccgcaaatttggagaaatataatgattaaagcgccttcgattacgagtttgcgcgttgataagctggctgctaacttcgtttaccttaaatgggatgatgttggcatggatttctattatgtggttgaattggcccgtagccgtgatatggacggaactattattccagacgaagagttaatctggacgcagttgggttatagctacgaaaacgaatggtttagcgatcaggttgccccaaatacacgttataaattccgtattcaaacaactcatgaagggtttgaaccttctgattgggtgatcagcgatgaattatggacgtttgatgagaacgcctacgcatatacaaccatgcgtgaattcacccctgctgattcgtttatcaatgaaaaattcgccaaaaacaatcgtgattacgtcgattttaacgatgatgttattatggcttctctgatggttgaggattttgtatactctcccctgtattctgatgtaagccagatcagcgataagatcctgaaacaagaaagctaccatgaaattcaagatcacatcgaacacgtttgtaatgatatagatcgcacgttcctggtatactcaaacggattgctttacctgtttgaacgttttcagaatatggctaaagtgtcaaatgacaaaggccaaacgtggtattactacaaagcattaaacgatcgtgtaggcaatccggtttcccgtaccgttgcttatcagagcgctaacactacgtatgtgttaggatacgatcgcatattttacgggcgcacgtcaacagatattcgttggtcttctgatgaagttcgtttttcttctgatgatgtaacgtttgagaagctggggaaccagtcagggttagattttgatgttgattcatacaacacatatgcgcgtctaccgggaggagtgtcgaagtatgccgaagctatagcttgttctaatgaatggctctacgtggctgctaagaacgttatgcgccgtattgcgttacgtaacacaccaattgatactgatcctggttcgccgacctttggtgaacgtatttttgatgaagtttcatataccatcgtaccaagaaatgataaaattgttgttaaaaaaatggacgtgctgaatgaccgtctatacgttctggtaactggtgaagttaaaacggcgatgatggatccgactgtcaaagctaacgtgatcccatcaaacgatgctggcgtttatctgtgggatgagaatgcaaagacgtttacccgtgtttatggtaaaaccgaagatgaacgtttttatatcactcatgaatataccaatatgtcaaccaatggcgatgaagtttacatttctgttggtaactacaaatatccaggcactttgccagatccagatctggttgaaaagtatccggaagatgtgcattcagcggtgaaatacgatcttgttcctggttatactgcgagcatttcgattaactttgctacagttcgtgcaaatcagaacgatcctacagtatggaactttgggccgcaagagtactacaatgaagcaaactttagctggcatttccgcgataaggttagcacatggatcaccaatgataaccgtcctctggtggtttatccggaaaccctgtatactctggttactgatagcgcgtctcctgcgtcaacgattcgtgtaaaccatgaagtttgggacaaaggaacagttactatctacttgaataatatcaagtttactggttttacgaagtacacaaacggtgttctgttgtatcgctcaggtggtaggataattggattctatgaactgtcataccgcgcaagggatgaactcactattttctggaaacccgataacactttaatggtggcaagtctggttaatcaggaacgtgaaaacccatatacgccggatattgaacctggattaatcgaccctgatctgagtcacatgatcactcgttttgctccgcaaagctatctggacaaccaacagttcgaaaaatttggtgaatactatctgcaatacatttcgttgggaagcaacagttactataacaaattgctgaacctcatccggaacaagtatccgagagagaaaaacaacgttgaatatttgtggtctgaaatcaaccgccgtaacatttacctggataaaaccaaacgtgaggcagtggttagatttttcgaatcacgtgcaagtgatttctattcaacaaaagggatcgaagcaagttatacgttcctgtttaaattgctgtataacgaagatgtttccgttgagatcgaaagctccaacagtctcgaatatgatattttggttagttcaacaaatatcagtcaggatatcgtaggccggacgatctatacaccaactggacgcgctaacgttacatacatcgaacgtgactatgaaaatggtcaattgcgttggtcaatgactctgcataatgctcaaggtaactttatcgaagggcaggttgtcaagtcagaaaaaaccaatttcaccggaatggtaattcgtggtgttcgcggtaaacaaatggctaacaactcgatcgactatatcaaccgtggacgatcttactatgtgatgaaaattcgttcaaatctaccgacttcccgttataaggatgacgtattgaggtttgttcatccggtaggattcggctttatgggtattacgatgttaacagtattcatcaactctggtttgtcaatgactcataacgagacaatcattgatattctgagaaactaccgcttcgatagtggttatcctaagttctggcctgatcgcattgcgagtatggacggtaacggaaaccaacaattcgacctggttactggtgaacctctgtacaccgtacacccgcgagcgggggaaccttttgatgtacctccggaatatgacattgaagaaaaaccgcttaacggtgttcttccttctgcgcgacggttcgatcaaagtccgttgttcgattgctcaggcgttaaatattcacagttccgtaatttggtggataaacgactgaaagatgatgcaggaaacccacgtgatccaaatcctccatcacagattaaggtaggaaattaaatggcacaacaaaacttgtatcggtcggtaattactgcaaaattccgaaccgaaaacttgatgaacttcaaagatatgatcggcgatgccgccgatctaaacacgatttacatgtctattggacgaactgaatcgtggtcggataacgaatccgaccctaacttcgccccgccatatccaaatgatagcaccgatggtgttagtgatatgtggacgcatatgatcggggctactaaagttcctggtgatatgatagatgcaattttaccacgtaaagactggggtgatactcgttatccaaacccgaaaatcttttactttaacgatattgttgttgtaaacaccgcaccttataaccgtactgatccgggtaaaggttggatggtttatcgtgtggttgatgttcctgatatcggttcttgctccatttcgagcattaccggaaaacttgaatgtatcaggatcggcggtatctggagtccgtctcatgaatctagtgaacctccacgcggagaagctaacgggatcgacatgggagacggttataaatgggaatacctctacacaatcccgccagatgtcgtgatcaaccgctgtacaaatgaacatatcgtagttcctttccctggcgaactggaagaggatccggtacgttggggttatgataacgtgattcaatggtatccaggacaatacgatctagtgtatcggttgaaggtgaattcaatgcgttttcgtgcatacatggattctcttttcttcccgcaatctacgcttcctggtaacaaagggttccgtcagataagtattattgtaaacccgttgattaaaaaggcaagcccgaccgagcctgaaaagaaagcaactggtgattactataatgctaacgcgcttgaacctgattccggacgtatgatttacatggaaaacagacaacctattattcgctcccttgatcagactgaggaagtgagtattgtattcgaattctaaggaaaaacaatggcttaccaaacagcaaaaaaactaattgatgtcggtgaaatcggcaacccatcaacaggcgacccgctttatgatggtggtgttaaactgaacgaaatgatcaccaacgtttataatgcgtttggtgatgtgcgtatgctgtctgcaaacgaaggtgtcggtaacatggtgatccatgctaccggatactatcagaaactaccacgcacttactattcaagcacaccgatcgaactgggttccctgcatgacatagatacttcaacaggttcgattaccgttgttcttccttctggtaaggttggcgaaggttgctacttcataaatagtacgggtagtgtctctgttgatcgtcctatcgcgtttcgtcctcaagttggggatactatcgcgggggttgcagaccagttgtatatcacgtcaccttacacctttgtaaaaatctggtgtaccaaaaaagaaggtgcggtaacaaaatgggattattctgtagaatctatgttcggttctaaaacgatgcctgttgacactacggcgcttgtactgaaagcaaacccgactgctattcctatgttcggatatagcgaatttagcggggctaaggtgcttgtatacgcagaaaacttagctggtacagttaccaaaatggcagaagttttaatgaccgtggatcgtgtacacaaaacgatttattcaacggaatacgctattttgaaaaacagtgaagatgaaatgtttacattaaactttactgtcggtgctggtgatgtcgtatacgctaacgtgcaagcgatcaaagaagatcgaattaaattcacgattaaagcaatagatacgattaaatcagggatcgcgtcatgaaacaagaaattttaataggtcagattgtagacgatggtacaggcgattacctgcgtcgaggtggtcaaaagactaacaacaactttacagaattgtataacatgctgggggatggtgagatcccccatccagcaggtgcctggaaaacttttgcgggtacgacgctatcaccaaaatttggtgaatcatgggcgttgaataccagtgcaaacaaaatcaccgtaaacctcccgaaaggcggcgtaggcgattataacaaggttattcgtctgcgtgatgtgtggtcgcgttgggctaccaacaacgttagactgatccccgcaactggtgatactatcaaaggttccccaactcctaaagatctgtttaaagattttatggatgtggaattggtgtattgttctccgggccgttgggaatacgtcgaaaacaaacagattgacaaaatcacaacttcggatctggcaacagtagcaaaagaaacgtatattgctactcagggacaaactgacttccctaacgtattcggtgttggtaatgaatacaacctgcaatcgttcgaagtttactatcgcggtaacttgctgttcatcgatgagaaagacggattcaatgctgataactcagactatggatcgattggctctgctcctggtgaactggttgcacttgatggtaattcagtacgtcttaaaaacccgtgtaacgctggtgacacgcttcaatttgttacctatctagatgggttagcaacatggcgttcgagctatgaagcgtatgtgatgcgcatgtatcagactggtgatacttctctggaaaccgttcctggtgaacagtgggtaggtgatctggcaaccaaaaaagagtttacacctgctgaatttggtgttaaccctcgcgtgttgattaaccctaactcgtttgaactgcttctcaacggtaaacaactggttaaaggcggtgacgctgactatccggcgttttcctgtgaaggtgcggaaggtgttgatgaaagtacgtgtgttggtaactctggtgtatgggttccgtcaggacaggattatagtttagtattcactgattctgtagtgacttcaatcaagtttgctcaggaactggaatccggcgacgttgtaacgatccgttggtttaacaatgatattggtactctgatggattgggaaggaactggcggtattaaagaaaaatctgataaggtttatctcaataacgaagaagaagttatattgacgaaccgtatcgaatataccgattataataacccttctcagaaaacaatgcgtaatacaggggaaacctatcaggggcgtattctggatattcaggctatgtttgatattatccacccgatcggaaccatctatgaaaacgcacataacccagcaaaccctgctgattatatgggatttggtggttggaaacgttacgcagaaggttatttcttggctggctggacatcaaatgtaacggatcctgatttcgcattaaacaataatgatttagatagtggtggtcaaccgagtcatacggcaggtggtactggtggcgatcgtggtacagaaatcaaaatcatcaacgttcctgaacttgtatcaaaagataaagttcttattgctgatgaaaatggtgctgtgatcattggtggttgtcagttagatcctgatgcttctggccctggatacactaaataccgtgaggatacattgaaagtgaatcatggtaacacattacctgataaaatcaaaactattccaccgtatatgactgcacatcgctggataagggttgcataatggcttacaaaaatatttcaaaaacaagggagggcgctcgcgtcctctctaaagaagcagattacttacagtatgatacttatggtaagttgcctctgatcggcggtaaacgttcgatcggagaaccaaacattgaccaaacaaaacgcggtgttctgtatggaaacgtacaatccgcaattgatgacctgtatacgcttatcgagcaaatcccgattaacggcgttgttaccatgactgaggatgcccctccaatcgctgtacagcaggttgagagcgtttcttttgatggtattgtacagaacatcgattcagaccaagaacaggctgtagttcacgtgtacggctttcctttcatctttgataatgggactaacgccgcaacagtttgtgaaacggcatacaacaaatttactgaattcgttgcagcggaaaaatatttcgcggaagttaaccgcaaaggtgttgatggtacgatccttgaatgtcgatttattgatagtgttccgcacccggcaacaaatatctcagaaaacggtattcgtcaaatcggaactatcgacgtagccgcaaaaagtggctatggttcatgggttaagttgggttctggtttcttacctgatgttactccgcaagtaaccgtgtattacttcaaacgaattgcataaggataacacatgagtaacaatacaatcaaccacgtaagtgataaatccatttacgtgacatttgacccaacaggtactgattggcctgataccataactaacgtacaagatgcgttggaaaaaataggtagttgggcgcgtactgatactgggcttcctatcgcaacaacttctgttcgtggtattgctcagatcgcaaccgaagctgatattgacgctggcacggataacactaagattgttactccgaaactgttagcatatcgtatgcagaaccctaaagcatcacaaaccgtatggggttatacgaagtattcgactgatgcggaatccacaaccgtaactaacgatgcatcgtctattactccgcgatctctgaactatgtgttcaataaccgcaaaggtacagaatcggtttggggttcttctaaaattgctaccactgcacaggctgttgctggtacagataacactgtaactatgactccgcttaaagtcaagcaagcgatcgcgtctctggttcctgttcagtcaagtgcgaccgaaagttcgcaaggtttggtacaactggcaacagttgcacaggttcaggctggtacgatccgtgaagggtatgcaatttcaccttatacgtttattcgtttaactgcaactgaaagcaacctgggcgttattcgtatcgcatcacaggcagaagcaaacgcgggtactgatgacaccaaagcgattactgcgaaaaaattaatcaatacccgtgcaactggatctcagttcggtgttgtcaaattagcaacaactgttggttatgtggcaaacactgcactttcttcaaacgctgcggtattacctagtgatcgaaatgcggtaattaacggttctctttatgagaatagcgcaatatataacaacaaatatcagacgtggacagatcttgattggcatttcccagtaggtgctattgtcatgactggttttcagactgaccacggtagtttgtatatttgtgatggtcgctcactgaataaaaataactatccgttactttttgagcgtataggttatacatttggtggtggcggtgattggtttaaccttccagattgtcgaggcgttgcagtacgtggtcatgaccgtgggcgtggactaaaccctaatcgtgggtatggtacatatgaaggcgatatgttgggctggcatgaacacccattacagcttatctaccagaacggcggtaatattcctaaatggcaagcagtttacgaactgaaaagcgccgaaaagaatgaccaaagcgctcgcgtatttgatgcttctataactaaagccactggtgtgggtggggaagaaacccgcatgaaaaacatcgcattaaactacgtaattcgtactcaatagaggttattaaatgatcatcgacaaattaaacccgttgccgaagatcccgtttgttgatggcgtcccagatgacgccacgactcaaacgaagattatttggatcaaaaacggtgaaactctggacggttcgccagataaagtgtcaaacactggtagtcttaaccgaactggtgtaaacatccagcagaacgcggttcagttagaacaaaataccatcacccataatgataaaatcaacgaagtaatcgatcaggttaacttgattactgaaaacattgatgctattggtgatgagagcgtaatcaaaaaagttaaccagttggatcaggatgttcgggcattaactttatctaacacccaaacacagaacaaggtagcacagttaaccctttctgtaaatgctcaaaacgatgaaattggtgaatacgatccagaaaaagatcctaaacaccgcacaattcgtaatgatatcatttacattaagaaagaagttggttcatatcctggatttaacgttgatggtgatgttgacccctcttctactggtactggccttaaataccgcgtactgagtaaccaacgtgctatttctatgcaggaaactcgcataaccaaactggaagatgattgggcgctttccgaagtaggacaactgacagaagaggtaaaagaacttcgtgctgaaatgggtgattctggtcttgccacaacccgatcaatctatgcgcgaatcaagatccttgaggatggttctattgtaacgcaaaatgaacttgatgcgattaatagttatatcggtcgcacgtcaagttcaaccagttccattaacgatcgtgtgaacagtctggaaaactccgttagttctctggctacacaaatcaatgatccggtaactggtatcactgcacaaattgcaaccattaacggtcaaatcggtacggcttctgctcagggtagtatccgttatgatattgcggaaactaaacgcagattgatggatatggaaatgattctgggtgaatccggcgatgatggattgcagggacaagttgcgatcttaactggtgacgttggtgaagattcagatcctaccagtatcaaaggccgtttgagtgttgttgagggtgaattgcgcaccaacactagcgcactctgggaactgcaaggcattgtaggtaactcttctagtggcctcgttgcaactagccagcagattaacaaagaaatctatggtgatggtgttagttccgatcctgttactcgcgctggtttgaaaaagacaacccgcaacctgttcactcaggtaggcgataacgcagaaggtaacgaaacgggcatttatgcactgattgccgaccttaataaacgtgttgaggatttagaagcgttgaacattgcacaggcacttgcagatcgcgtaactatcgaagatctgaatgctaaactggctctgtacatcaaagaagctgacgccgatctccgttatgagagcaaaaacccgcctctgtcattcggtactaacctaactggtgatactgaatacactactggcgatccattgtctctaagcgtaactatgactggtggcgtttctccgctgtcttaccagtggacgaaaaacggtgtaaacgttggcacaaactccaacacatttaccatcgattcgctacagccttctgattccggaacctacaaagtaacggtaactgatgcaagccataaagtcatcgtttctgatgaactggcgatcactgtcgcttaacgattaacaaggggcttcggccccttttgaggatctttatgattacgaacaacccagcacaattaaaagatgaaattctgcgccgcttaggtgctccgatcgtcaaaatcgaagtgacaacagatcaggtttatgactgcattcaacgagcattagacctatatgcagaatatcattacaatggatctaacaaagggtatatcattcttaccctggggccggataacccgaaaaatattttcgatctgagtaaagaacacattttcgcaattactaaagtattgcgtactaacatgggttcccttgtatcgatggatggtactgcggtttatccgtggtttactgatttcctgatgggccttactggtggttctctgggcggtggtggttgtgcatcacgtacctacggaatgaacgcatacggcgcggatatgggctattttacacagatgatgagctatcagcggtcaatgcaagatctcctgtctccgcttccggattactggtataacgacgacacaggacagtttgcagtatacggaaccgttaaagatggtgatattgttgttatcgaagcaatgatcagatcctttgttgatgtacccagtatggtcggtaacgtctctggatacgctacagcgggttctgatggcgaagataagccaactatagcagatatatacaataacccctacaaagctgtctcaggcggtgtgaaggctggtcaaggtacaagcgttcagagttcatcctctgcgtataacaaccgttgggtgaaagattacgcaactgctcttgttaaagaggtaaacggtcaggtgctggctaagtttcagggtatgcaattgcctggtggtgttgctccggatggaacccgactgatacaggaagctatgcaagaaaaagaaaacctccgtcaagaacttctgttactgtctgatgcacttccagtgttgatgatgtaaggaggaaaaatgcactatagattgtatcttgttgtttttgaaacttctactggattaaaaatttatggggggaagcgtcattccccttatgataatccacataatgacccatatacaggatcagggacatatataaaaagagctattaaaaagtatagccattcttgtattaaatgcattcgatggtctaaagaatttcccaacagagaattactagcagaagcagaagaattattagttgatgagataatggattattattccagttgtgctaatctagtacggggaggaaaaggcggagtttctttttatgatccatcaaaaaacccaaatataggttcaaaacgaagtaaagaatctagagataaaatgtctatgattgccaaaaatagaaaatatagcgaaattggccttaaaaatagacaagaagccacccgtataatgacaagaaatagaaaacaccatgatgtttctggtgataaaaatcccgctgcaagaaaagttatcgttgatggcgttgaatacccaacattgaaagaatgcggagaccactacggcataacaaaaaattctgtatttcacagaataaactctaagaaatgggagggatggaactatgcgtgattgggatgaaaacttatttgcacaactggaatctggggaaggtgtagacaataacctaaaaacagaagttactaataagtatgttaactggtacaagtataaccctactcaacagttacatgattcactaacagccgaagcaattcaaatgaaatctccggatatgtattacgtccgtcgagaatttgttaatattgataaaattttgggtgaagaccgtgaatcgaagtttacaaaatcgtggaaaattgcagcatacatcgattcgtatgcaaactacgaagggcagagagatttttacagtaaattcggtatgatgtcaaacgatgaaatgacacttgtggtcaatcctcgtttatttgcacatcaaactgatggcgggatccctgttctgggagatttgatttatttccctatggataacagcctgtttgaaattacatggattgagtttgacccgttcttccagttcggcgatcgtcctcaacgtaaaatcaacctcgttaaatttatctatactggtgaagaattggatcctaaactgcaacgaaatgaagggattaatcttgctcccgatgctgatctggatctcgaacctattcgaaatcttgatggattggctgataccaatattgaacagtacgaagaagatcaagcctttgaagatgaaggcgatgaattcattgaatcgtttgatgttgttaacgggcgcggatcaccgttcgcacagttcccataaatataaccaggggaaaccctatacatgtaagggtataggagaaatcttatacccgctttaacccatacaggaaaaagaaaatgtttggctactggtataatagttcgctgcgaaattatattgtcttgatgggttgtcttttcaatcacgtgcaagttaaacgcattcgcggcgaacaagaaaaatttatcaaggttccgattacctacgcatcaaaagaaaaattcctggcatccatgaacaagctgaactatgcatacagtcaggaaaatgttgctaaaacggaaacaattttaccacgtatgaatctatccctcgttgatttgcagtataacgcaattcgtaaaacggggatcgcggtaaaccaaaaaatgacgcagttacgcgcacctggaaaaacagtaacgcagtttaatcctgctccgtatcgtctcatgttcgaactgggagtgtatacccgttacgaagatgatgtgtttcaaattatcgaacaaatactgccatacttccagccgcatttcaactgtcgtattacagaattacataaaaacgacattaaaatagaccgagatattaaaatatctctgcaatctgtttcccctgatacatcgtttgaaggcgatgcaacgacacggcgacacattgaatggtctttaatgtttgaattacagggctacctgtatccgcctgttaacgagattaaaggcgagatcagaacagtatacacggatttcttttccaatatgaacccgttggacaaagacaattttgaatccgttgatgctcaggtggatccggctgatatgcctatacaggattacacgggagaagaatacattcaaacgtatgctaatgatatcccaattcctagcggtgatcaacctcctaaaccgaggggccaataatggaagaatttagcgtaaaacaactacttgatcttgaaaatctccctggtgctgaaactggggaagaaatggttgtatatgaaaaactcgaactcgttgatgtcgagtcacacccagcagatcgaaaacctgatttagaggaagactatgcacttgcgcgtaaaaccgcgcattacatgaatcagatgatcatggatatggcacaaattgccttgcataacgctaaaaactctgaatctccgagacacgttgaagtttttacaaccctgatgaatcagttaaacaattctaaccagggattgatgaaaattcataaagaaatgcgagaaattaccgaagaaacaacaaaaccaggatctgaaaaaggtaatggcggcggtaatgaaatgaacatagagaatgcaactgtatttgttggttcccctacggaattaatgcagaaatatggtagtgcatacgaaccaaaagaaggcttcattaatggtgaagcggtagaggtaaaccctgatggaaatggaaccgacgatcgatccgagtaaggaatcagatcacccaatcggattaatgcatcccgattatctgaaaaagaaaattgatgaatttgggatggagtggacgcaaagcgaacatgataaaaaatggtatccgacaaagtttagtgattacctaaaaattaacggtatccataaagttgatattcaagcaaaagacagttcaaactttgcgacttataaaaacaaaggaaacaagaaaactcgatataacggaaacccaaacctgaaacgcgcgtacatccaaacgaaatggacgcaacagatgttgatggagtgggttaagtgtcgtgacgatattgtttattttgctgaaacatattgcgcgatcacccacattgactatggtacaattaaggttcagttgcgtgactatcagcgcgaaatgctgatcgaaatgcataaaaaccgtatggttgcctgtaacctgtctcgccagttgggtaaaacaaccgttgttgctatcttccttgcacactttgtgtgtttcaacgaggataaatatgttggcgttttggctcataaagcctctatgtctgcggaagttctggatcgtacaaaacaggcgattgaacttctccccgatttcttgcaacctggtatcgttgaatggaacaaaggttctattgaacttgataacaaatgtaaaattggtgcgtttgcatcttctcccgatgcggtgcgtggtaactccttcgcaatgatctacattgacgaatgcgcgtttattccaaactttattgatgcgtggttagcgattcagccagtaatttcttctggtcgtaaatcgaaaatccttatcacaacgacacctaacgggcttaaccacttctatgatatatggaacgctgctatagaaggaaaatccggcttcgtgccatacacggcgatctggacatcggttaaagagcgtttgtatacagacggtgatgatggcgtatttgatgacgggtattcatggtcttcgaagatgatcgccagttcaagtaaagaagcatttttacaggaacactgtgctgaattcatgggaaccaacggaaccctgatcgctggctggaaattgtctaaactatcatgggttgatactgatgaaacagaaactaatttttatcagtataaagctcctgtagagggacataaatatattgcggtactcgacccagccgaagggcgcggtcaggactatcacgcgatgcatattatagatattacatctatgccgtttgaacaggttgctgtatatcattcaaacaaaacatcgcaccttattttgcctgatgtcctgttacgttatcttatgatgtacaacgaagcatgggtttatatcgagctaaatagcacaggccactcagtggctaaatctttgttttctgagttggattacgataacgttatttgtgatagctataatgatttggggatgaaacaaagtaaacgatcgaaagcgattggatgctcaaccctaaaagacttgatagagaaagataaactcatcataaataacaaaaagacaatacttgaatttcgtactttctcagaaaaaggtgtttcgtgggctgcggaagaaggtttccatgacgatctcgttatggcgctggtttgctttgcatggctaacaacacaaatgaaattcgcagaattttgcgagaaagacgatttgcggttggcaaatgaggtattcgcacgtgagcgcgaactgctttatgaagatatgttatgtcctgttatcgtaacgagtggcgacgaaacaatatctgtcggccaacacggtatttcgtttatataaatttagaggaaacttaataatggctttaatctctccaggcattgaaactaaagaaacatcggtacaatctaccgttgttcgaaattcaactggtcgtgctgctattgttggtaaattttcatgggggccagcttaccagatccgtcagatttctaacgaagtcgaactggtaaactattttggctccccagacaatgacaccgctgattatttcatgaacgctgtaaactttttacagttcggtcaggatctgcgtgttgttcgtgtcgtcgataaagaagccgcaaaaaacgcaaccgcgatctataatcagatcaaaaccacgatcaccgctgctggttctaactatgcagtagacgatcagatcaaagttaaacacaataacgttgttattgaagaagatggtgttgttaccagcgttgatgatcagggtaaagtcctgtctgtgttcattccgagcactaagatcatcgcacacgctaaacaggttggtgtatatccggatctgtctagtggctggactacagaaatcgtttccagttcttctggtgtttctgctacgattacaatcgacggcgtagaagttgatccgggtattactctgctcaaccttgacaccgcaaaagaaactattcaggcaactgctttccagaaactttgcaccaaatacaagctaccgtctgttattgcaatttatcctggcgaaatgggtagcaccgtaacggttgaaattctgtctaaagctgcatacgattcttcggctgtcattaagtcttatccttctggtaagtctggtaaaaacagcggtcgcagttcgatgaactttggccctcagaatgataaccaatacgcgtttatcgttcgccgtggtggtattatccaagaaacgtttatcgtgtcaaccgctaaaggtgataaagatatctacggttcaacgatctacatggatgatttctttgcaaacggtggttcgcagtatctgtatggtacgtccctaaactggcctgtcggattctccggcgttctggaactgggcggcggtacttccgcaaactccactgtaggcgctgatgaactcatggctggttgggatatgttcgcagatcgtgaatctctgcatgttcctctgctgattgctggtgcttgtgctggcgaaactgccgaaatttcgtctactgtacagaaacacgctgtgtctatcggtgaaacccgttcagattgcgtcgtattcgtttctccgccgcgttctgctctggttaatatcccactggctcaggccgttgataacctcgtagaatggcgtacaggctacaaaatcggtaatactaccccagttgataacaacatgaacgtaagttcaagttatgcgttcatcgacggtaactataagttccagtatgataaatacaacgatgttaaccgttggatcccgctcgcgggtgatatggctggcctctgtgtttataccgatcaggtatcgcaaccgtggatgtctccggctggctacaaccgtggtcaactgcgtaactgcatcaaactggctatcgaaccgactaacgcgcatcgcgattctatgtaccaggtacagattaacgcggtcactggtttctctggtggtgctggatacattctgtacggtgataaaaccgcaacgactgttccaagcccgtttgaccgtatcaacgttcgtcgcttgttcaacatgatcaagaaagacatcggcgataacgcgaaatataaactgttcgagaataacgatgatttcactcgttcttccttccgtatggatgcaggacagtatatgtctaacgttcgcgccctgggcggtgtatacgattaccgtgtggtttgtgacactacgaacaacacgccggatgttattgatcgcaatgagtttattgcatcaatctacgtcaaaccagcacgttctatcaactacatcacactgaacttcgtagcaacctcaactggtgcggatttcgatgagttgattggttcaacgtcagtataacatgtaaggggctgaaaagcccctataaatacacatagaggttagaaaatgcttactgatattgtacgcgcctttgaatccggtgatttcgcacgtccgaacctgttcgaagtagagatcccgtacctgggcaaaaactttaaattaaaatgtaaagccgctactatgccagcgtctaccgttgaaaaagttccggtaggttacatgaaccgcaaaattaacgttgctggtgaccgtacctatgatgactggacaatcacggtatataacgacgatgcacacacaacccgtgatgcaatcgtagcatggtcaaacatgctgcatggtatgggtgaagacattacaggggatatccctgcaaactacaaaaaaaccgctacggttaaacagaaaaaccgtaacgacgaagtaaccgccgaacataccatttatggcctgttcccgaccaacgtgggagaggttactttagactgggatagcaacaacgaagtgagcacttttgagtgtactttcgcgctagactggtgggtttaaacgctataaatacaggggtagcaataccccttatcattatttttcggagttgtaaatgaacttttttggattagacaatgtgttagggtttttcaaaaatttcgccaaacaggatgaaatggaatttgaagcccaattaaaagatgatacaggttcgattgcgcctccgaaaaataacgatggggcgcacgaaatcgaaacggacttatcaaaccagcgttattcttctgtgttccaacagttctattccggacaggatccgcgaattcagaacaaaacacagctaataaatacataccgtggtatcatgacatatccggaagtggaaaacgctgtttctgaaatcattaacgaagcgattgttaatgaacaaggaaaagatattgttacgatggatcttactaaaacgaattttagtaaaaatatccaagataagatcatggaagaactcgataccgtaatgaatattcacgatttcgataaccgaggatctcgtttattccgtgattggtatgttgattcgcgtatctatttccataaaatcatgcacaaaaatgaagctgacggcatcaaagaattgcgccagttagatccccgttgcatggaactgatccgagaatcggttacagaaaccctacccggtggggttaaaattttccgtggctatcgtgaatacttcgtatacaccgcaccgaaaaacggttatagctacaacggacagatttatagtcacaatgacaaggtaaaaattcctcgctctgcgattgtttacgctcatagcggccttgaagattgcgacaacaacattataggctacctgcaccgcgctgtcaagccagctaaccagttgcgtttgctggaagatgctatggtgatttaccgcattacccgtgcgcctgaacgtcgtgtgttctatatcgacgtaggtcagatgggtggccctaaagctacacagtacgtaaataacattgcacagggcttaaaaaaccgtgttgtatatgacgcgagcactggtaaagttaagaatcagcaaaataacctgtcaatgacagaggactattggctgatgcgtcgtgatggtaaagcagttaccgaagtttcaacgcttcccggtggcactgccttctctgatatcgacgatgttaaatggtttaaccgtaagctgtacgaagcattgcgtattccgttaagccgtatgcctcgcgatgatggcggtattcagttgggtaacgatggcggtattacccgcgacgaattgaactttagcaaatttattcgcgaattgcaaattcaattcaaccctgttcttgcggatccgttaaaaactaacttgatcgcgaagaaaatcattacagaagatgaatgggatgaaaacgtaagtaagattgcttttgtatatcagcaagattcttactattccgaaatcaaagatattgagattttggaacgccgtttaaacctgatgggccaacttgaaggggtggtcggcaaatatatctcccataaatacgtaatgaaagaagttctccggatgtctgatgaggaaattcaaagcgaagccaaacagatagaagaagaatcaaaagaagaacgttttaaaaatccagaagcggaagaggaaaacttttgatgaaagaatttatcgaagcaatcaaaagcggtaatctggtggaagctaaaaaaactttttactccatcatggaagaccgcacagaagcgcttcgtcacgaattacgcgttgaacttgccgaagctgtacgcatcgaaggcgaagaagacaaagaaaaagacgacgaaggcgctgataaagatgacgaaaagggcgataaaaagccagccgaggatgataaatccgataaagatgatgagtgaggtgtgtaaatgcaacttgacatcgaaatcaccgccgaagatctccaggaacatttagacgaagcgaaagcccgtgtagatattctgggtatcgatgaaggcacggttaaaatcatcgaaaatttggcggtcaccgaaccaaatttagcccttgctatgatggcggttgttgaaggtttaacacttgatgaggtaattgtcaagcatgttgattcccgtggcaacgtagaacgcctcaaagacaggaaaacccgtgagcgtaatgcgtatcagactaccggattaactaaatcccaacgtcgccagatcgcgcgtcgtgctctcaaaacaaaacgtgctaacccgtcaattgctactcgcgcacaacgtaagcgcaagaaagcattgcgtaaacgtgctgcactggggctataaatatgaatgaatcccaaatcaacgaaaacggcgatatgcttttaatcgaagaatggggtttaccttgcggtgacgtttcagaatctattttagaatctgttggggaatcaaaagacggtaaattgcggatcgaaggtattttccttcaagccgaaaaggttaaccgtaaccgtcgtttgtatcctaaaaacgtacttgaagaagcagttaacgattatattagaactcaagttaacacccgtcaagcattaggtgaaatgaatcaccctccgcgcccgaatgtggatccgcgaaatgcttgcatcctgattgaaaaattgtggtggaagggtaacgatgtttggggccgcgctgttgttgttgaaggcgacggtggtgatggtgacaaactggcggcgttgattcgtgctggttgggttcctggtgtttcttcccgtggattaggtaagctctccgattccggcaaaggctacggcgttgtacaaaagggctttaaattagctgtaggcgttgatgtcgtctgggggccaagcgcacctgatgcatatgttaagcctatagtggaaaatcagcaaagcaaaccgcttgttgagaataatagtgctgatgacgcttttctggcattgtccgagcgtttgaaaggtctataaatacattaaacaaaacaacaggaaaatcaaaaatgcttaaagaacaactgctggcggaagcccagaacctggatactccggtcgagttagacagcattttcgaatcagttgaactttctgatgacgtgaaagcgacattcaccactgtattcgaacaagctgtaaaagctggcgctgcaaaactcgctgaatcccacattacccagatcgcggaacgttccgacgaactggtcgaagctcaggtaactgaacgtgccgctgaaatcgaaactaagctgtacgaagatgctgataaatattttgcgcacatttccgaagaatggctgaaagaaaacaaagaagccgtttcccgtgacatcaaagccgacctgtttgaatccctgatcatgggcctcaaagaagttctggttgaacataacgttgtcattccggaagaacaggttgatgtagtcgccgaactggaagacgaactgactgagaatcagcaggaagttaaaaccctgtttgaagcgaatcaggaactgaccaaagaaatttcagaaatgaaacgcaatgcagtagtttcagagaaaactaaaggtttgaccgaatctcaggtcgaaaaagtagaatctctgattgaagggctggaatattccgcaaccttcgaaaataaactcagcgcaattgttgaaatggtagcaaccaaagctgaaaaacccgttgacgagtctgtaaatactccgcaaacgaaagatgactttgttccggtagtcgaaagtgttccggcagagaaatccaagatcaataaatatgtacaagcggcaaaagccctttcttaatttcaaaaggtaagaaacaatgtctaagaaaaacgaattgatggaaaaatggaacgatcttctggagtctcaggaaggcttaccggatatcgctaccaaatccaaaaaacaactgattgctgccattatggaagcacaggaaaaagacgcagaagttgatccggtttaccgcgacgagaaaatcgttgaatccttcggtggtttcctggcggaagctgaaattgctggtgaccacggttacgacgcaaccaaaatcgcttctggtaactcaagcggtgctatcaccaacatcggccctgctgtaatcggtatggttcgccgtgcgattcctaacctgatcgcgttcgatatctgcggtgttcagcctatgactggccctactggtcaggtgttcgctctccgcgcagtgtacggtaaagatccgctggcttccggtgctaaagaagcattccatccgatgttctccccggatagcatgtactccggtcagggcgcggctccgagcaacggctttaccaaactgacttctgctcaggccattgctgacggcgctattgtgttccacgatttcgttgaaactggtcgtgtgttcctccagaacgtttctggcgctccggttactgtaactggttctaccgacgatgctctggatgctgctgttatcgccgaacaggaaaaaggtactctggctgaaatttcttacggtatggctaccagtgtagcagaactgcaagaacagttcaacggttctactggcaacccgtggaacgaaatgggcttccgtatcgataagcaggttatcgaagcacgtagccgccaactgaaagcacagtactctgtagaactggctcaggatctccgcgctgttcacggtatggacgctgacgccgaactgtctgctattctggcaaccgaaatcatgctggaaatcaaccgcgaaatcgttgacatgatcaactataccgcacaggttggtaaaactggtttcactcagaccgttggctctaaagctggtgcgtttgacttccaggatccgattgatgttcgtggcgctcgttgggctggtgaaagctacaaagctctgctgattcagatcgacaaagaagcaaacgaaatcgcacgtcaaactggtcgtggtgctggtaacttcatcatcgcttcccgtaacgtggtttccgctctggctcgtatcgatagcggtatcactccggcaggtcaaggtctccagaagactctgaacgttgacaccactaaagcagtattcgctggtgttctgggtggcgtgtataaagtatacatcgaccagtatgcacgtggtgattacttcaccgtgggttataaaggcgataacgaaatggatgctggtatctactacgctccgtatgttgcgctgaccccgctgcgtggttctgatccgaagaacttccagccagtaatgggcttcaaaactcgttacggtgtaggtatcaacccgtttgcgaactctcgctctcaggctccgtccgaccgtatcacttctggtatgattaccaaagaaatgttcggtaaaaacgcatacttccgcaaggtttatgtgaaaggactttgatcctaagttattgaaaaataacgatattaaagggaaccttcgggttccctttttcatttctataaatagtgaaaacgattgaggctatattatgaaacatattatctacaaaataacaaatttggtcaataataaaatttacgttggtgctcattcaacagaagacatcaatgattcatacatgggttcagggattgcggttaaaaaagcacaaaagaaatatggaatgaataactttgtaaaagaaatattacatgttttcgatacccgtgaagaaatgtatgaaaaagaaagagagatcatcaatctcgaattcataaatcgtccagatacgtataatgctggcataggtggtaaaggtgctcctatgtcattgattggttggtctgacgaacaaaggaaaaagatttctgaaaatactgcaaaggctatgcgaacaccagaactaagggagaagatgagacaatcccgtttaggtaaaccacagtccgaagaatccaacaggaagcgctcagagacgttaaaagctaaatacgtgaacggacgtacagacagagagtataaacctctcacagaggcgcacaaggccaaattaggccgttctgtatccatagatggagttgtatactcatccggatcagcggcagcgaaatcccttagtatgtcccactctggtttaaaatatcggattaatagcgacaaataccctacctggaaatttgttgcataaataccattatacactttacgcaggaacataaaatgagtgaaaaattttacacaattaacaagctggtgcgtcagtcacagctaccgcctggcctgtctaaaaaggttcttgatgaggcaaccggaacagaaacaattaacgtagctaatacccgtccggatctggtatctcttacccgtgcggtaaacaacctgatctacggtgaacttgtagcaattcaggaaactaatttgcctaccgcaaccctgtttggtgtgcgttatcgtaaccctaaaggcgatatgacgttttccagcgctgctacctattccggtaagtatgcaagccgtgataacattccagttggtgcggttggtactgcctataccaaaggccaagtttttaaacatccgacaagcgatgtcgtatacgaagcaactgatagcgtaactctcgcaggtgctgatattgatgaagcaattatggtcgcagtattcagcaataaattacgcctggcaagcgaagccgcgccaacaagtcagtatgaaaccagcgaagatattagcacaacttctttcgaaatggatcgttggaatatcaacgttcgttcccgtaaattcaaaactgaaatgaccgtggaacttatgcaggatctggaagcaaaccaattcaacgcagaaaatgtgattgaagatgttctgggtactgttgccagcgaagaagtaaacaaagatatcatccagactctgatcaacgtatcacatcgttacaacgttgatggtgtggtaacaaatggcattttcgatgctacaaccgcatacactgcaaaggatgctccagctttaggtcgtttcctgtatcaattagtgtgtgaaatggggcaggaaatgaatagaacgacttcatttgaagctacctatgtcctggcctcttctcgcgttgtaagcgttctgtctgcgtctggttggatgcatgaaactgatgaaacccacccgttagcaacaggtcgacttaaaaacggttactatgtctatactgacaccaatacaccgtttgattacctgctgactggttgcaagtacgatctgggtgaaatggatcatgttggctctctgttctatacgccatacacagaagctgatcaggcaggttcgatcaagatttctgttgatcctcaatccttacagcctaaagttgctattctgatgcgctacggtttatcggttaacccgtataccactgctgctaatgaaagacttgtgaaaggtgatgactgggtaaacctctcaggcaaatctaaaatgagtcagattgttggtatcaaacttcctaaactgggttgatagtataacccaacggggataatattcaataggtggagtagggaaacttactccatcttttaataattattataattaatattaaattagatcttgaatttataaatgatttatgataaaatttattaattataattattatagatcaaataatttttgaaatcaagtaaaaataaatttgattttataaattagatcatgtataattattcttttaataatatattatattagatcaatttaaatttgactacaaattaatatagtatattatagatcaactgggtaaattggtgagtatgttatgagtttgaaattagaagatctgcaaaatgaacttgaaaaggatatgctgatagatcccctcaagttgcaatcagaatcagcggatatccctaagatttgggctaaatggcttcgttaccattcaaacgcgaagaaaaaactgatccaacttcatgctaaaaaagaagctgatgtgaaggatcgtatgttgtactacaccggaagacatgacaaagaaatgtgcgaagtggtgtatactgggactactgaaatcaaaatcgcgatcgctggggatccgaagattgtagaaaccaacaagctgatccagtattatgacatggtggtagatttcaccagcaaagcactggatatcgtcaaaaacaaaggatactctatcaaaaacatgttagagatccgtaaattagaaagtggtgcataatgtctactgaaaatgaaaaatgtgtagtgtgcaagtgtccggttccttctactggttttgtgactgaatctgggcgcgtgtgtagtactatctgtgctgactacatcgcagaaaaaacaaaaaacggcgagatcaacgaatccgatgatctgaatgaagttcaaatgttgctgtaggaggatcttatgattggatacggtgaaggaattacagatcgtgatgaacgtccagatctcttagaatctgacgaacaccctgatttttagtgcataaatactagcgtacccgaaaggggcttgataaaagaatgctggatgataggcgtactcttttgcgccgtccgatggagtttaccttcggcggggtgattgataacataccttcgatcaagggcatgagtaaaaaaagccagaatagtacctcactggctataatcaaatgtacgtgttgggctgattgcgtcccaaaattaaaaagccccttcctttcggttggggcttcttttttagaacttttcttcttctccgctttctagttcggcctttaattcttcggctcgacctttcagcgcatcgcgcatagaaatatcgtctgacggcgcaacatcaacttcttttacacgatttttgtaatatttttcaagctctttaaggccgtccatagtacggcaagaggcgaccttgctcatgaaatcatcaatagccgcctcataaagtcgaaaatcgttgaaactcttcattttgacctctaaatttcgatttgtttgatcacgtagtcaaacttttcttcattgtaaatgcgtactcgttcgattgcgtgtttcataccatagtttttgtatgaatatttatttttagcatttttggactttgccagcgttgctaagttatcaaccaaatcccaaacagtagcaagagatttagaatcatgtttacgcagtacgcgcccaattgactgtttgactataacagcagatttgcacggatgcccgaagatgatgtgatgaaggttcttaacagaaatacctgtactcagtacgccaatagaaccgattacgatcagccccttcgttgactccgcgatccgtttcatttcgtttcgctcatcaatccccgtttccccagaaatgtatacaacgttgtcatatacctttttgagttgctcatacagccatttaccatgtttgatctgattgaacatcacaaacacgttttcatctttttcccttgccagtttcaacgccagcttacagatccatgcgttacgcctggtatgcgatgttatatacttgatttcgctttggtaatcggcccccttcattttcttaatctcatcctctttgtatctcatgaagatggtattaattcgaaggttggtaacttgaccttcctgcatcaatcgatttgtatcaactggcttgaagatttgaccaaaagcgccaatgtattgcatcatgtttgctttgccttctttcagagaaccagaaagaccaaacttgaaaatacactgatccattgtgttgatgatcttctgtatgctttgtcctgttgatttgtggcattcatccaccatcaaacacatgaactgctgaaaccactcaggaggcattttaacagccgattgccacgtagacacgtagatcaatgcattactgtttttagcagttcctgaacgtattccaagcattgcctcgcgaggtaaaaggcgatagtttacaatatcaccgatcatctgatcaacaagggcggttgttgggacaatgattagtactttgcctgtgtaattttccagacaccaacgagatatcaacccctggataagagatttacccgctgacgttgggaggttaagcacagcacggcggtttttaatcgcatggaacaccgattgtttttgataccaatacggatcaatctgcttgtttccgtcgtatactgggtgttcttctaaccacttgtcaaaatctggctgggtaatttcttctgtttcgtggatcttaggatccatccagatagaatacccgcgagactccgcgaattttgttacaagataggctaaaccgtagggcagtttcccgttatagtccatcaagtatatgtagccgttccatccaccatatttgtattttgcctggtactgataacctggcggctggaagctgaaatagtcgcgcaattcatagactatgttagcctctgcctgaatctgcacatgactagtgttaaggaatttgacttcgatatccactatgtgtatcctatatacggtttatatgaatatttataggctaaataatgataaacattggagaactacaatgagtattgattacgaaaaggttgaaggtttcaaagccttagaacaaaaagaagccaaattacagcttgctacctatgcgcaagaaacgtttgatgtcaaactgaaccgccagaagtcattcgaaaatatgcttgctgatctggaatctgccgtaccagcagaaaagccggaactgttgatcgactcccccgatcctgaaattgttacatacgaaggtgaacaatccgttcctgatgttgttattgatgtgactaacgatttcatggattacgttaaagaggttgctccggaaatcgcagaccagattgaaattgttcctgacgctctacaagctcctgtaagcgattctgagacgttttctgatgaactggcatggatggaagggtttaccccgtctatcatcatgatgggccgctctgtttcgaatactggcttttatacgtgtccgtattggatctatgattggatgaaacaaaatccggattggtacaagcaccctgacagttgtcctcattattcagcgcgtcaaaccctcaagtcgctggcatggtacatgcatcgtgatgggatggttactgtaagggaaacccgaaacagccagttctacacgttcaaaaaataattttaaaaagtagttgaccttgccctgctattcgagtatatttgtattcgaaggcgggggaatggctctcgcagtgaagaaggaaatacaaaatgaacatgatgaaaaatgcttactacccagttctgtttgtttggactaatggtgaagttaagaaaatcgtcaattctaaagctccttattacactgttggtgaagcacttcgccacgctgcggaagcaaattatcctgctcatgccgaacctggttatgctcgttggaacggttctaaatgggttgctgatacctgggacaactacgaagaagaaagaatggagtgtgatcctgattacgtatctcgtcaaatggaagctcatatgattgcagatcgtagactggataatgaagctcgcggattttattgattaacaaggggctacggccccttttcttttaggtgaaatatgaacttaaatcacgaatgtttaaaagatttgagcgatggtaacgagattggtaacgttatttttcttgatatcgatggcgttctaaataatatgcggtgcatgaaatttggtgaacatatggacatcgaatgcgcacgacacttacgccggatagtgaatcacgctaattgtgatatcgtcatttcctctacgtggagaatcggcaacagtacccataatctacgtgaaatattttatccgtggggattgtatcggatcattggtaaaacttgcactaacttccctcatagcactggaatgcgtggtgatgaaatcaaggcatggatcgatactttcggatgtaaaaactatctcattcttgatgatgacaccgatatgctttcttcacaaaaagatcattttattaacactgatgggtttgttgggttgaccgaagaacaatccacttatgcgatccgtaacattttcggggttactactccgttttgtcctgaatgcaatgggtatggacgtgttaacggctacgacaaatgcggaacgtgtaacggtaaaatactccggctataaataccaataaacataagaggttaaatttatggcaattccttctgtaacaattagcgccaacaaaaacgaacttttgattggcgaaactttgaccttagaggttgaaactactgaactagatccgggtgatgtgtttctggcctatcgttggcaaaaagatggtgtagatattccaggcgcaaccgccgatacttacacaactacggttgacggtacaactgctggtgattataccctgatcttaaaacacggtgctgatgaagaatcagcaacagaaaccacgtcagatacaatcaccgtgacaacttattctgatgatctcgtttctaaatggacggttcacccgattccgtggcgtgataccagctttaccccgatcggttattgggtacttgatgaaattctgtatcagaaagcacagggtaaagattggaaaactgattatgctgattacaagtatagtgaggaagtacaaacgatcctgaaagcgttcatggaaaatggtgaatgtgagatccaggattcgcgaaacggctatattcataaaatgagtgaaatctaagaggctttaaatggcaactgaaaaatggactacggttcatcctattccgtggcgtaataccagttttacatatcttccatactggctatacgatattatcgttgatgcttttgagaaaggcgacgactggcgcgattatgcggaagaaaaatataaattagagtttgatactctgaaagaggcgtttgaagattatggtgatattcatgtaatcgaatctcgtaatggtaaactggttagtctgttgtcattgactcctgctcctgaaccagttactgaccaataaaataaggcaaacaatgaatacacttctttttgatttcgacgacactttagcagaattttctcaggctttttatgataagttcggtgtacgtccggaaggaacgccaaaagaacgatatgacgaaatggcggcttctttggtgcgtactgatttttataaaaaccttccccgtattcaggctgggatcgacctccttcaatggagtttccaacgccgaatcggtgatcctgctactttgctgcttcgcgcggaagcggtcagccctctttgggttatgaaagaaaaactgaactatacagataagatttgcgctgaactggggatctctcgtctcgattttagtcgcattgactatccggaacagttcgcagaacatgcctatcgtggtgttctgatttcccgcaaccagaaacatcttgaaatctggaacaattctcatctagctaataaagttccaggtattttccttgcggaaaccctggaagaaaatattcagctagtcacggaagcgcttgcaaaggctaatcaataacaaaaaagggaaccgcaatggttccctttttttacaatctttttaattcatcaagcgctgttttcttatcaccaacaaagaggattgctttacctcctgcttttctgaaaggcaacaccgcttttgcccgatcgtcaaacagaattcctttaccagcgaatgctgctttttcatggctacttttaacgtagtggaattctggaacgtaacccaatactttttgtaatgctttacgtttttgttcggcaacaccgtcagaattgaatttaccgacactggttagtattgctacatcaccaagtgttcttaaatgatggaataattcaaatccttctttgattggttccagattttcgtagaaatcagttttggcaatttttgctttgcactttttcaactcatcttctgtcatcatcgagggttcgccatacattggcacaaatgaaccttcccagtcgaacaatacaccatccatatcaaagaaaaacttattcatatcaattcctcagtttgtgtatgcatactataatgtttaatcattaatgtcaaccccaagtgtcagttttcggtgcgtatgctgcaactttagccacaatttccttatccagttcagctacagatttctgaggcttaccacgggctttaactttgatgtagtttgacttaacaacaaacatccctttgttacctgatttcttgatctcgctatcaacaccaactttgttaaagctgatccaaatgtcgccgtccatatactgtttaagagaatcacccatgttcaggatcttcgccatagtaagggccgcgccttcgtgggtatccatgagaatttctttaggaactacacgatcgcgtttctggttctgctgcatagcaatatgcacatcgttcataacccatacgatatgtacgttttcttttttgtatcccagcgtttcgacatcacgcgcgatgcttgccagcttgctcatgccttttaacgttacgtcaaagatgaggttaggtttacgatcttctggtgctgccataataccggaataaacacggttttggtttttgttggaaatgttgaaaacgtcggcgatcacatgatggagggtagatacgttttctgggtttttgaggttcattgttttgacatcatgacccgtttgtttcttgatctctgctgcgagtttatcgctacccattacaagttttttcagggcgtcaacgtccagtgtaataccttcgatgcctagcagtttttccagtgtgaatcctttaccggaaccagcaccgccagccagaataacaacctgaccaaacttaggataagcacggcccccgaaggtgatcagcgcttcggttaaggtgctttctgtgaattgtttaaatgacttcatgtaaaattctccagtttattttctattatttattgacatgctttctgacagtggtgtatggttatggtgttcgacggataggccggaagaactttaaaccataaggtatatgatatgaaaattgatttacatcgcttcattgcagaattttcccgcgaccgcgacatggactctttcaactactactcccgtgaaattgaagatcgttttgcgactcatgttgggttccgtcgccaccatactcctaaaatgcgccctgaccacgatccgaagtatagccctatcacatggcaagccccgatcaatggttacgttgaagggatccggatcatgacttttaacgcgatgtatggaaacgctttgatccatattgcacgtgagaaaaaggcagaattccctaacggctggcgtattgatgaagtgattcaaaatcttatgcagttacgacgtgaatacaaagcgggtatgtgtctgcgtaatgaacagtatccgatgtataaaacgtatgcctatatctctaagcatctaattaattccatgttttacatcgttggtaatcatggttccgctatagatatcggttcttatgaaatcgtggcttatgctcgagaacaaggaaaggccgctgcactgaaaatcattgaatctggtgctatcattcttaaccatcgcattgatactattgcttactatggtgatcaggttgaggttgaaggcgtacaccatgaacgattcaacaaagccgtatttgctaaaaatggttatgcttatggtaatgacattataacttctgctattcctttcgttcgtctaactgttgaaggatttggagaaaggttgccttataaactgtcagaagctcaaatgtgtgcggctgctgaaagaatcgccaaaaagcggaaaatgtataccgatgaatacctggcgtatgtcaacaagacaaaagaagatgtagatcgagaaatttcttgcatggatttgtgcctttgatataatgtaagcatcttttaaagggaggatgcatgaaaacgatacattgcagaaatgaaaacgttgtttactatcacggttcgtgtactgctgctggtattgaaagcatgttattgcctccctgtgattctgatactctgtctgaaaaaggcaggaagaaaaatttagaccgtgttttctttaccgctgatatcgggttagctcgtatatacgctggaagggccgcgcgttctataggtggggatcctgttctgtacagggttgtgtgtccggttgatgttgtatgcatgaacgaagacaaaggcgcgagcgtttaccatgcagcatgggcgttttgtgaggaattatgaatgataaagtgttggcgtatctcgttttcttgctgggatatcgcttagaagtgatgggcgcgtattcatcaatttatggtgatttaacggctatctggatggtcgggttaggggttgcttttacattcctttcctttgcaattgttaatgaatcggaaaaggatattgtatgaaactatatcatgtgatctactctggtgttttaggcattgacaaacaaatgttagttgatgtaatgtgtaaaaaactcgatgagcgaattggaacccgatacaaaaatcatgtatcggaaagtatcttcatcaacgttgaccatccaaatgacatggaagaaatggttaatactcttgatgatcagcagatcccgtttgttgacaatttcaacatgagcgctggagtgtatacggtagtaacttttgttctaaaaaatgttgacagccgaaacgatagcgtgttgaatgtagttgcaaaaatcgattctaccaaaggaaaataatatgaaaattgtacaccgtagcatttccgaactgtctcaagctgaaaaagtgcaaattcatttcaaattcaatgatttgcgtaaaggttatgccgaaattgcccgtgaacatgggttagataacggcgatatttaccaggtagtacaggaaattgaacgtatccgcgcgttccgttctgcaaatctccctgttaaaaatgcaatgcgccgcgaagcgatcgaaatccatcgtaagcgtgtgtacaatttagaacgtgctaaacgtccgatgaagaaagaaaagaaacctcgcccgtttaaacgcgaacatcttaacacctctatggcgctggcgtttcaagatgcggggattatctaatgcgtaaatctgcgatggatcgttgggctagtattgctacttcaaacgtaaaaccaaatcaagccgtgcctgatgtagaagcggttcgtaaagcaaaagaacctgagatcgtggcccttagccctgaactcatcgagcatcgccgtcgtgcgtctgctattgaactggatctgcgtattgcgcgttcatataatctcaagcatgaacacgccgcaaagaacaaccattcttttgaccttactctggaagattggaaagtattgatgacaactgaacgttgtcagtattccggcaagctgtttagcaataaacccggtagcccgtatgcccgtacaatggaacgtattaatccacgtctgggatatacacaagaaaatacaatagcggttatcaacgccgctaatgccgaaaaatcacagcttgatgcattcgttaagggtgatgtcattctggatgaagtaaaagtgaagttgctgcgtaaagcactttatcaagttgaaaaacgtgtgaaaatgaaaggttaaattatgtttaagaaatattcttctctgactaaccattatgaaggtaagttcatcaatggtgtaattatgaacgggcttactggcggtgtgtgggttgcacgtgaaaagatccacggtgctaactttagctttatcaccgatgacggtattaccgttacccccgcaaagcgtactgatgttgttaagccagccgaagatttttatggctgttcagcagtagttgcaaagtattccccagggatccgtaagatgtgggaaaccctcaaaaagaccggaacttatgatgatttggttattcaagtctacggtgaatttgcggggcgtggtgtacagaaagatgttgattacggcgaaaaagatttctacgtattcgatatccgcgtaaatggtgaattccttccggataacctgtgctcgctgatctctcgatctcatggcctgaaaatggccccgctgttgggatacggtacttttgaagagatcaaagaactgccgatcacgtttgaatctgttgtgaataaagcaaatagcggcattggtagcgataatacagtatatggtgaattcgtatatcctatcatggaagttgaagagggaaacattgcagaaggttttgtaatgaaacctgtttcacctgcttttatgccaaacggtgaacgcgttgcaatcaaatgcaaaacaaccaaattcactgagaagaaagcgaagaaagcaacccgctttaatgctccggtttcactgtcagaaaaagacaaaaaccaactcgatgagtttgtttgttaccttacagagaaccgtgtgaaaaacgttctttcgaaactggatctggcttcgatcactgcgaaagatttcggtcgcattatgggcttaacggttcaggatgctatcgaagaaatcagccgtaatcatgggcctttcctcgaacagttcgaagacccagcaatggctaaaaagctgtttgtaaccgaagcccaaaacatgattcgccctgtatggggcaaaatcctgaaccatgaattttaatcagattctggttgatgcaaaagcggcttccctgatcggtagccgtaaacctcctgaacgtatcgcaaacattgctgttaaaatcggacgtgctttgaacgaacgcgggatcagggcttattctggcggcgctcctggtatggatagtcactttctgtttgactatagtccggataacaggtgtataatccttcctgagaatggttttaacggacttttctcaaacggaaaggatatcatcgactttcgagatttaaacacgcagaaagccgctgacgaagccagaaaggtagcaggtaacttcgatacacagaatgaatacgttcaaagaaggtatgcgcgaaacacgattcaggttcttcgtgaaaatcttgacaacccaaccgattttgttttattttgggcggaagaacgtgaaggatgtgttaaaggtggaacagcgatcgctgtaagattggctagattgtacagggttccatgtttcaatctcttcaaagaaagtgtattgaacgatgtgtgtgatacgttagggatcaatatcaaacccccaacgttggattttttatggtaattgaacatgcgcccttacttcgtgaaacatacgaaagatgggctgttaataacgcaataggtgaaaatatgattcatgtacgtagtatcggtactgacggtgaaactccagtagaaggccgatcaccaactctcgcagaacgagcaagagaaattatcaacgatcagaatgctaagatgatcgaacatgcgcgggatacaatcacaaaaggtgttctgaaacacgcgacacaacaaagccttatctatgatatgaagcacgatatcggctcttgtctgggtattgaatgtactcgctatgcgttccaacgggtttctgaatggttggaagaagaagggctaacattcgataccgaagaaaaacgcaacgccgcgaagatcacaaattctctggctagtaagtacaatcaaacgtaccgaaatcaggaagaacgtgaagtgttcggtttcaaaattcctgaaaggaaaacagatcgccgtgtaagtgaattcactttttacattagttggtaaaaaggtgttgacgggggttggttatagtagtattctaactcccgtagacaagacactaactcagaaggataaacatcatggaaatcgtaatgaaagcaacttatgctggatattgcctggaagcaaaaggtgttgctaacaatggcaaaggcttacgggccaatgttgaagcaatgctggatgaattacatgcaatgtacgaatatgacaacgtagcgggtagcgttcttatccaggcgttggaagttgatggtgttgattgtgctggttggtgggatgcttacattgactacaatgataaccgggtttacctgttgagcaacaaagattatttctaaggaaccactatgagcgatgaagctgaggctttagaagattgggctgattttgatgacgaagaagacggggaatatttctgcgttaacagtggtgcttacaaagaccgtttagaacttcgtgaacttttatccggttcctctcaaatatcaggatccaaacgaaaaagtagtaaacaaaaagttcaatatagtgatggttctgtacgtgatgaaactgttgttgctgaatttcgtggtcgggttatcacaaaagaacgacaaattgatgtaaagaacttgtatgaagtggctaaggctgctaaaataggttctgtgattgtttgccctgtgtgcaaagaaaaacacacaaagacaacgtatcacaaagttttctgttcgaatggcagaaaaaccagtaaggattgtaagtctaaatatcacaatacaatccatcccgaacgactggatcgggtattttaaaataaacttaaaacgtggagtacgtttatgaacaacaaaactttcgaagaactgaacagcattatcacttccgtagattcctataaggtttctcactggtcgcaatatccaactggctccgaagaggcgctgttttatattgaatctcgtggtggtaaatttgatcaagtagttacggctggctgtaaccgccttgcgcaaatcctatcacgtccggtgactatggaaaacgtagattttgctaatcggttgtacaaaatgcactttgggcgcgaaatcttcaactacaaaggttggaaagaaattgcagaactgggttacatccctcttgaattcagagcgattccggaaggaaccccagtagcggttaaaaatccggttgcaactttccatgctgggaaaaatgcgctgtggttagcaggacacgtagaaaccctggcgatcaggggagtatggttcccttcaaccgtagcaactctatcccgcgaatgtaaaaaagtgttgaagaaatatctcaagaaaacctccgatctcgaaggtgaagcatttgatatggtgttacgtacccgtttgcatgacttcggcgcacgtggaacctcttctgctgaatccgctggtattggtggcctcgcacacctgtataacttcctcggtactgataccgtagaagcgctgattatggctatctctctgtttgaagattgtcagaaagcgtttgatgatggtgaaatggcggctggtatttcaattcctgctcgcgaacattccactaccgtttcttacggcaaagaaaacgaagaccttgcgtacaaaaacagtattgagatcttcggcgaagggatgtatgcatgtgtgtatgattcctgggattttaaagcggcggttcgccgtattgcagaatataaagattcgattctttctaagggcggtactctggtagttcgtccggattctggtgatatggtagacaatatcatgtacgctcttgaagaactgggccgtatctttggctatacagtgaactcaaaagggtataaagtactacacccagcagtaaggatcattcaaggcgatgaaattcatggccctgaaacaatcaatcgggtgttgaactggatggagtctaaccgttgggcgtctgaaaacatcgcgtttggtatgggcggcggattgcttcaagaagttacccgcgacactcaaaaatatgcgatgaaaatgtgcgcaatcaaaattaacggtgtgtggactggtgtgtataaatgtccaaaaggcgctgaatggaaaaagagtaaaaaagggttgttaatgactatcactgatggtgttaactttaaaaccattgatactctggaacagaaagtgccggaaggctggaaagatgctatgatcacatactatgtcaacggaaagattactgcccgtgacactttagaggaaattaggaaccgtgccgggatttagtatccgcaaaaacgacaaaggaaccgtgattttctatgacaacatgccccttgtagctcgcaaggggctttttgctaaaatcgctgggtattcctttaaactggaagaagtcaacgacgaaacactaaaagagatcgtaagaattgccttacagttaagaggtaagaaagacgaacaaaaagctattgacatgatcaataaattgggtgaaactcaatgcttcatagtgaatcgtggttacaagtacgataccattgcaaaatttgaaaaagggctttgtgaattatgagttattatggtgtgatcccatacacaggaaacaagcaatcgctattacctgaactattcaagctgttccccgaaagaagttcatacatgcgtttcattgattgtttttgcggtggccttagtgtgtcgctaaacgtccctaaacccgttctaagcaacgattatgataagacgctgattgatatgtatgagcgtcttaaaacgcttcctgacctgtctccggtgcgagaattgattgcatcgaaggggctggggaaagacaataaagaagagtatctgaaattccgtgatgaatacaaccagaacaaagatcctttatggctctatgtcctgatcctgcattcattcagcaacgttaaccggacaaacgacaaaggcgattttaacgctgctgtaggaaaacgaaccctcaactttatgacagaaaaacgtttcgaacatttcaaaaagaatgtgacaggaattgaatttcgttctggttcatactctgatattgaaatcaacgataacgattttgtttattgcgatcctccgtatctgatcactgatgcggtgtataacaaattctggaacgcagatcacgaacgcgagttatatgctttccttgactccctgcatgagcggggtatcaagtttggtttatcaaacgtgacacatcatgcaggaaagcaaaatgatatcctgatcgagtggatgcaaaaatataatgtgcataacctcgataaaaagtatctgttaggccagcatactgattcttacgaacaaaataaaacgcaagaagtctacgtgtgcaactaccagaaacgcgacgtaaatacataccctgaaacactggatgacttaatgtaaggtaacatatgtttaagatttttggttatatcccttctgtttataattgcgctccatgcctgaattctaaacgtctcctggacgcaaaacgaaaagaatatgagtttgtttctgtagccgatgaaaaagacgcagacggcaaaccgatcctgaatgaaacggtcatttctgaactcgaaagcctgttaggtactcgtagactgaccatgcctcaaattttccacgatggtaagcacatcggcggctttgaccaactgcgtgagtacgttcgcacgttgggataaatattaacacctttatttgattggtgttattatgctcactaaacgtattactaagaaagattacccaacaatcaagcaagctctctttgagaaacaagggggctgctgtgctctgtgcaagcgtcctttagagggcgacattgaaaaacatcacctcgaccatgaccatgctttagacggcgaaaacgccggacgtgtgcgcggcctactgtgtaacctatgtaacggtacagaaggtattgtaaagcacaaattcaaccgatccggtctggtgtcccgtgatgttgactacatcgcctggttagagaatctgcttgcatatctcaagcaagactactccgaaaaccgtattcatgacaaattcataccagataaggtaaaatggttttcaagacttaccaaacctgatatgattgccgaaatggtttctatgggctttgagtacgccgaaaaagacgaacgcaaagccttaaccgcaaaatatagaaagcaattaatgaaggcaacgaaatgaaatatctaaacgctcgattatcaacacaacagaaaaaaaagctgatgatgttgatatcctccactgacaaaaagatcatatctctgcatgattggatacttggaaggggtgactctgatttgtgttatgtcaaaccgaaagaccgaacgatgtttgatgatcgcggtcgcacattgactaatttttctcctatcaccgttattgatatgtgggaactccttgagattgtaggacgggatatacctgttgacggggttgaactgatcaaatatcttaacgagattggacacaatttagatattatccataaggcaacgaaatgaaagtagaaaaacgcgacgggaaaaccgttgattttgatgaagaaaaaattcgcaacgctgtgtataaagctggtgggactatgacggatgctgatgccgcaatcatgctggttcagtacaatcagatccgcgatggtagcgcaatgaagatcgcccgtatccaggaactcgttgaagaatccctgatgaaaacgaacccagcggtcgcccgtgcatacatcgaatatcgccacgatcgcgatattgcccgtgagcagaaaagtaaactgttcaaagatatctccggcatggtgaatctgtccaacaaagagatcaccaacgaaaacgcgaacaaagacgcaagggtattcccgacacagcgcgatttgctggcgggtattgtggcgaagcatttcgcccgtaatcatatccttccgaaacacatcgtagaagcgcatgattccggtgacatccattatcacgatctggattacagcccgttcaccccttacactaactgctgtctggttgacctgaaaggtatgcttgagaatggtttcaaaatgggtaacgcggatattgaaccgcctaaatcgatcggtgttgctaccgctctcatggcgcagatcaccgcacagattgcctctcaccagtacggcgggacaacatttgcgaacgtggataaagtgctggctccatacgctcgtatgacgtatgaaaaacatgaaaaggatgcacggaaatacggtatttctggcgatcgtacatacgcgatggaaaagactgaaaaagacgtgtatgacgcgttccagtcttatgaatacgaagttaacaccctgcatactgccaacggacaaaccccgtttgttaccatcactttcggtactggtacgggtatgtttgaacgtatgatccagaaagcgattctgaaaaaccgtattcgcggcctgggtaaagagggtatcactccagtattccctaaactggttatgttcatggaaaaaggaatcaaccttgatccagaggatcgcaactatgacatcaaacaacttgccctggaatgttcttcaaagcgtatgtatccggatattattagcgcggctaataaccgtcgtattactggctctagcattcctgtatctcctatgggttgtcgtagtttccttagcgtgtggaatgatgagcacggtaatgaaattcttgatggacgtaataaccttggcgttgtgacaatcaaccttcctcgtattgcgattgaagccgaagcacaggaagatgaagacgcgcatgatgcattttggcgtatccttgatgaacgtctggaactgtgctttgaagccctgatgactcgtatcgatagcctacgcggtgttaaagccagtgtagccccgatcctttatacagaaggtgcgtttggtgtaaggttgaaacccgatgatgaaattctggaactgttcaaaaatgggcgtagctctatcagtctgggctatatcgggctgcatgaaacgctgatgcttttcggatctggacaacacccattcgaccggatcggttctcagaacatgggtagactgattctggaatatctacgcgctgcgaccgaagcatggaaaaagaaaaccggatttgggtttagtctgtactcaacccctgctgaatctctatgtcatcgtttctgcaaactggactatgagaaattcggaagtatcaaagggatcacagataaaggctggtacactaacagttttcatctggacgttgaccgcaaggtaacaccgttcgagaaaatcgactatgaagccgattatcattacattgcaactgctggacatatcagctatgtagaattccctgatatgaaaaacaacctggaagcccttgaaaaagtctgggattatgcaatggataaactggactacttcggaactaaccttccggtcgataaatgctttgaatgtggctctgatgatgaatttaagccaacagaagacggttttcattgtacccattgtgggaaccatgatccggaaaaaatgagcgtcacgcgccgtacatgcggttatcttggtgcggtagatcgcccgatgaatgcagggaaacaaaaagaaattattcatcgtgtaaaacataactaggaacacttagtatttgcgccttcaataaatatattaaaattgagggcgcaatatgttttatacaatttataaaattaccaataccgtaaacgggcgcgagtatatcggcgctcataaaaccgatgatttgaatgatcgttatatgggttccgggaagaacattaaacatgctattgatttctatggcatcggttcttttaggaaagaaattttacatgtattcgatacagaagaagaaatgtatctaaaagaagctgaattagtaaccgatgattacatttcacttccctatacttacaacatcaagccaggcggtaaaggaggaaccgcatatgaacaaagcgaagaacatagaaagaaaaatagtgatgctctgaaagggaggattattactcctgtccatcgtaaacggatttcagaagcattaaagaaatatgtcagaacagaagaacatcaacaaaaaatcaacgagatgtcaaaatctgtcgtatgtacacccgaacatagagaaagaatgtcgatacaatctaaagagttgttcgaaacccgtcctggacttaaatccaaaatctccacatcgttaaagtctttttatgccaatgagacggatgaacaacgacaaatccgcattcttaaacatacgggtaaatctacaacagaagaaaccagacagaagatctcgcttgctcataaaggtaaaagagtcggggataaaaatcatatgttcggtaaacctgctctgaaccgtcgtcgagtttccggcgagggtatcgtatatgattctgttaaggaagccgccaaatcactaggtctttctcagggaactatagttgctcgatgcaaatcagataagaataaagtatggttttacgtagaatgagcaaaagcccttgacttcggttgagggcttttgttatattgggcctatcgaaaagaaaagaaggttgcaattctatgcagcatctggggaatctatcaatctaattgatgatttaattgaagttgggtatgtagacgacgggaaaattttaaaagctcctgattatctacgtggtaaactattgaaataggtataaattatgattttcaacaaaacaaattcatgtaatttgaactatctacgctgtgaactggaagctaacgaaattgaactgtttttctgtggggctacagatccggaacataaattgcattgggtatcaggtgagattgtaagcctaaccgatcagattgtcgaagaggctacccgccgcaatgcaatcgttaaaattggtgctattgatgtgaactacgaaggacatccttcatttttcattcaatattatccataaaagtattgacctgtatatctgaatgtagtaacatccttcttgtcaactaaggaggatgttatgaaaatcaaaaacactgctactgaaactctttgcaacgaaattgcagaaatgtactggagtaaaggtcacttagaggctatgaaagagtttcaaaagtggtgtgatacccaaaagttagctaaatgggaatacatcgttattgttgaacggatcaaagaactgatcctcgtgaagaaaggttcattcttgctgtcgcggtgaaataaaaagttataaaggctatacatggagatttgaatgaattatattagaatttataacatggatgtggtcaacggaaaagggatccgtgttgttttgtttgtggctggatgcaatcataagtgtgatgggtgctataatcgcagttcatggaacccttgcaacggaacaccgtacacggaagagacagaaaaccatctgatttctctgttgagtaatccgcatgttgatggacttacattaactggcggcgatccgctttaccgtgacaactatcctactatcctaaaactgcttgagcgcgtttctaaggaacttccaaagaaaaacgtatggttatggacaggatatacactggaggctttacaggccgacccagaacgttctaagctacttccttacattgatgttctgattgatggtaagtatgaaaaagatttgccaacgaaaaagccgtttcgcggttcagataatcaacgtatgatcgaattcgctaaaaattcgatagaaattaaaaatattgcttgacctaatgtgtaactatggtaatcttaccacatcgtaaatgacgattaactttaattgagagataatatcatgatcctgaatttcaaaacccgtaaagaagcgcgtaactactgctggaagtggaacattcccctgaaaaccatccgtaatacagggcgcggttcttgcccgtggacagttcaagcaaatgaactgaaaacgttcgtagttggtaaaacttacaaactggttgaccgtgaagggtttactaccaattcacacggtggatctaacaccgcaaacactatccaggcgagacagatcgaaaaattcctgaataacgaggtaaaaattatctcgaaaaccaattcagatactttcaaaatcgatcatactccggaaatgacttttagctctctgcgttcgtgggaagctcgttatttcgtcgaagttggcgcggctccagctaagaaaaagaaagccaaaccgaaaaaagccaacgttacggctccggttgcgcctgttgcaccagcaaccgcagatcttgatcaaatgcttgatggcggttcggcaatgtcggttgaactggatccgactaaatttgttgaaggccgttcgtatgttctggttaaaccgcagcaatttaaaaatagttgtggcgctaaccctgggatcaaatcatataccgatgaacacagtaatggtgtatacaccgtttaccatacaactgcgctcggtcatcatcgattgagcaaaacggtagaaaccattgattccccgaccggaaacggaaacgttggttactatctgcttgattctgaacgttcgttcttccgtgaactggcaaccggaactgttgatgaacctgttagcgtttccggtaatagcgctatcgctatcaatgtagacgaagcggctaagaaagaagaaatcgcaaaagcaatggtacagcttgaagaagcggttaaagcccatgaggacgcgcttcaaaatctgcgtactgcttccgacctggttcgcaaagctgctcgaaaagtagcagaagtaagcaagtaaattaaactgggtgctccggcaccctttttttatgaggtgacacatggaattattagaaggtaaatcttataccctgaacatcgacgctaaagaatttgcagaaaaaacctggcgaaatgctttagctgaattgatcaaaaacaacggctatattacaatcgatcgtattgcgattggggatactgaggacattgcttatgttctgcaagatgatttcgaatatgagatccctagccatatctggaaatacttcaaaccatatgatttaccggaagaagaaccgaagattgctactaaagaagaaatcgccgcgcctgatttaaatttcgtatcttccgatcctaaaatgtggatgactgtaaaacctgttcaacaagatatcaatgatctgcgatttgattatccttttgtcaagcggatcacttcgatttctgtactaccagcgccgactgattcacaggcacttgaatttgcattacagcatgttttcggtgataataagctgtacgcgattgacaaggaagctgctattgatgaacagaaaaaggaaatcatcaaccttctttctctgcatcaacaacttgaagcggtggaattgattgagcgtatgctttctgatacaaagaaagatatcattagcaaaatcactccggcacgaaggaaagcaattgatgaaaatcgagatttacggtattcccgaatcgcttcataaatgttatggttgtattgaagctcggaaattacttgatgagcatggattagaatacgaattttattctgttctaaagccagcaaataacagtgtggggtttgattacgatcggccccgcattgaagagttagcgaaacgtgttcgtagtcgaagcatggcatttacttaccctcggatctttgtagatggtaattttattggtggttatatgcaattgaaagagtatttgggtgaagcatgaataaagaatacattcgcaaagtagcaaacgctattcacgcaacaacgattgattttctggaagggtttgatcatattatccaccctgaaacgctggatagttgggaagccaaactgtttaaaagtatcaatgaacagtttccggaaaaggttaagcgctggtttatcagacaggaaatcgtagcaacgatccttaatgaacgtggtgttgaggcgttcggtgtaacccctctatataaacgaaaccagattacagacgaaacaatcaagaaatataaaaagatggttcggaagtaataaataatcagttaaatggccttcgggccattttttgtatataaatattggtattgaatacaatataggaaaaaagataatggtagctaaatcattccgcgcacgaagtggccttgatgctgctggtgaaaaagttatcaacgttgggaaggctgatcgtaatacgctgagtgacggcgttaacgttgactttttcaatgaatttaacggaatccagcagtatgacccgacccgtggctattctcaagacatggcgatcatttatgcgcgtcgtatctggtacgcaaaacagaatattgcttcccctgctggggctttcgacgaatccaaatggatcgcaactcgtaatgacccgaaatgggtttatagtaacgtaaccactccagacggtagcattattgaatctggtagttacattatggctgatggacgctttactgaacttctgtacctgctgccggataacccgacagagggcgacgtaatcacgtttaaagattgtggtggtttagtaggtgtgaacagtatccttgttaagtctaacacccgtcagatccgtttacgtactgtacaatcggcacagtatcgactgacccacccgtacatgatcgcaacgtttatctataacggtaacgtatggcgtgttgctgaaactctggataaccgcgattctgagatcgtgaacgcaaccggaacaggttcattccagttacaatctggtatgacagttttccgtaacagtgctacgggtaaaatcactctccagttgccgaaatatgcaaatgatggtgatgtgatcacaacctatgacgctgataaaatgaactctatcaacgtagccgttttgcagatttatccaggtagtggacacactatttctgacggtgcaattactggtgttacttcggtaactagccagaaatctggctttggtatgttcatctttgatgcacagaatagccaatggaaagtatatgatgctgataatcgtgttcgtctgcgtcgtatctatagtgatttaaacacagttcctaacgattacgtttttgttactgcaaacccttctgggactataccaaacgttacagttacccttccaactgatgttgctgatggtgatcgcgtttacgtatccctttatatgatgggtaaaaaccagaactgtacaatcaaagttaaagatggtacaacggacaagatccgcaccaacaaaaatatgatgcagttcccgcagcgcaaagactatccgcctgatgattggtttagtgtaacttcattagcatttaatgctgctagtgattacctcccgtatatcgagttttcttacatgaaagctacgaaagaatgggttgttgctaattatcgtccgatcgttgaacgtgttgacgcaactaacagatcgcgtactggtgttattgctctggctgcacaggcagaagtaaacaaaaacttggaagacaacccgaacgacgaaactgctattactccgatgacgttagcaaataaaactgctacagaaacccgtcgtggtattgcacggttagcaacaactgctgaggttaacaaactttcaaccgatacctatctggatgatgtgattgttactcctaagaagctgaacgaaagaacagcgactgaaacccgtcgtggattggcagaaatcgcaactcaggcagaaacaaacggaagcaccgatgatattacgattgtaaccccgaaaaagttgcataaccgtattgcatcgccgaccttaactggtatccttgcccttgttgctacaggtggtgctcctaacaccaacacggatcgtgatcaggctggtactggggtttatgatcattcagattatcagaaagcggtaacgcctaaaactcttcgtgagtataaagcgactcagttacaatctggcgctgtatggctggcttctgaaaccgaagttattaatggtactgttgcaagtgcaaacattccgaccgtagttactccggaaatgctgcacaagaaaacctctactgatggtcgtattggtttgatcgagattgcaactcaggcagaaacaaacgctggtactgattacacgcgagcggtaacgcctaaaacgcttaatgatcgtgctgcaacggaaacgctgacaggtatcattgcaattgcaaccactgccgaagtatcagcaggtactgtaacgaataaagcgatcgtaccgtctaaactgaaaggttatctggacgatacaagccatattactgttgctactgctgatgggttaactcaatctggtactatttggactacggttaacatcggtattcaatcagcaactgaaactcaacgtggtactttacgcgttgctacgcagtctgagacgaacgcagggacattagatacagtatttgtcacccctaagaagttacacgctaagaaagcgaccgagagcgcagaaggtatcattcaggtggctacggctgctgaaactaccgctggcaccgttacaaacaaggctgtttctcctaagaacttgaaaaatacaattcaggttgatacttcatggcaagctaccgatctggtacgtggtactgtgaagctgtctaaggggcttggtacttggtctggtaatgatgtggctggttctactcttccggatgatggttatgccgctgtaggtgttgctgtttctccgtatgaactgaacttaacactgaaacactatctaccgatcggtgctaaagcggttgatgctgataagctggataatctggattcttcccagttcattcgtcgtgatattgatcagacggttaacggggcattgactctaacgaaagaaaccactgtacaggctaacattaactcaaccgccgacgcgagtttccgggtaatgaatgttagtggagatctgaacgttggtgatggctcatcgatgggtaaacttcgtttgaatggcggttcatctaacgactggtcaattcaagcaagttcatcctctgggcgtattgcaatgatctcaacgggtaacactggcacagttcatctttctgtgtataatgatactcgcggcgttgtagctaacgttaaattccaggctcctgaaattcaggcgattggcaaagtgactctgggtaatgatacagtgatcacggctgctggttctgttctctctatgggtacgaacaacaagacaactaagatcctaacttcggacgctggtaacattttggcagaagaatcagggaactcttataaagtctttactgagaagaacgcgcaaaccttgctgaatcctacgtatgtacgtaaagcaggtgatacgatgtctgggcgcttgacggtaagcaacagttcaattatcattgcaggtcaagcggattggtcaacgctggatgcagtaacagaagcatccaggggcaactggacggctgagatcacagcatcggcacaatacaacttgcttcctggttatgcggttccggttcttgaaccagatccgattaatccagaaatcatgattgtgacccgttatacctatgttaaagcaccgggtactttaacgcagtttggtaacggaactgcattcacttatcagatttgggcacctcgtccgacctctggtactggtgttaatgcgctggcgcaatccttctggatccgtcaaatgaacccaattacgggtaaatttgatggttggggccgcatgtatactagcaacaacccgcctactgctggtgagattggtgcaacgtctgctgttggtactacggttaaaaacatgactgttaccgattggatcaaagttggtaatgttaagatttacccagatccggttactcagacagttaaatttgagtgggtggcataatgtcaaacttaatggcggggttcggccccgattttgtagaaacgcaaattctatcggaaacaaacagcgtaacttacagaataaccgcaaaggcaacacatcccaatgcggttcctaatcagtatgagtttacactaaatcaaaaggcggtagggacaccgcctagtgttgggatcaacgtatggagaattaacaatgctgtagttgatccaattaaaaccttcacattatcgaatgataattcagcaactgcaaacaaagcgtttgttgaatatatggatgctcaaccttctgggctgtatttgataatgactaacggtgaatacaaaacaagccaaatcgttgatgattggtttgctaaaaacagatccgttatgtggcaaggcgctgatttcgctcagagattcccaaattctgcatatgttgcattgtatggggcttcaaaatctcgtatactgattgaatcgttttacgcgaacgatggagttttaaaagaagattcacgcgcatcaatcgatcttgtctatgataacgttggtgatgttgggcgaactggtgtacctttccgatctgttgaagatacggaagaatacaattcaaccaatgggtctgaatataaagtatatcctgttgcaaacccagtgatctctaaactggctgattatggtatggctcctggattagctatgatgattgctggtgatttttacgccagcaaagcattattggatgctggatcaacaacaagggttactgttcgatggtttacgggtactgctcaaacttcatcatcggtgattgaagttcctgcaaataaacctgatgagtggttacgatttgaacagttctatacgatccctagtggttgtgatggatttaacgttgctgtatctcgttatcctaaacccgctacggatagtttatctgcgatccgtaactttgtgatggttcaggtatctgctgccgaagctgatcaaaactttgctgcacagtttggggttaacggtatcagaatgaacaacatgatcgatggcggaacaccgtatatatttgaattgcctaatactaaggtttatccaggtggtgattattctgcttccgaattccgtgaagttgatgcataaacaaaggcccggaacatcgggccttataaatatgtaaaaaggggttattatggcagatttaaaagctggttctacagtcgggggtttacctatttggcactccggcacatttccgctggttccggttggtaatactctaacctatcgcggatataaggtttatactgaaaacgataaaccgcaagcatcaaataacgacttcgtttctaaagcaagcggtggtcaatatttgggtgtagttgcctttaaacaggggctacaaattaacgctactttcacaggcggaagtgaccagaacggtttatattctggtgatggtgatggcgcgacattatcaaaagccaacattgatcttgtatcatggtatggtattggtattcgttcatcttccggtactaatggtcgcgtattagtcatcaacgctcgaaatggtgatttaaacactcagggtaatattacggttgaaaagcaaatcagtattacaaccgctaaccctactgacgcaagtcatgcaacacgaaaaagttatgttgatggacagataaataatgtcacaacaaatgctaatagcagggtattacgcgctggcgatacaatgacagggctattaactgccccgcaattcgcgagcacaggcgcggcttcccgtcccgaacacgtaccacggctcgaccaggtaattactaaagggactatcatagattttggatcttattaaggtgaaacatggctgatttagaaaaaattcaattcctacgtagcacagttgcggggaaaacacctactacaagtcagcttgcagatggtgaactggcgatcaacatggctgattatgccatttacacgaaaaatggttcttcgatcgttcagttagcgggtaaaggtatcccagaaacaaataccaaaaaattaacagttgatgggcctagtgctcttaatgataccgttaccgtagcggaaggtaaaactattactttcaccaacgagaatttaagtggtgaaataactcgtcatatcgtcggtaaatgtgccagcaatgatggatggtacatcggttccggtggtacaagcaataacggcattcttgaaatcggtactattgacgatgatactgaaacaatccagtttgtacaacgcggtgctggtaacgtagaagccagaaaattagtcttacttgatagctctggtaatactactcttccgggtgatttaagattaactagcaagactgttaaaatttcgaatggaagcactcttacactagaaatgggtgtaggtgctaatgacgcttacattaaaaacttgagaggctctggcgttcttcaattaactaatgacggcaatctgacattcagaaattcccaggtttattatgccacggatggaagaggccctggtaaagatggtactcttctgactaatgtagaaaacgcgcgtcagcttgagcaagataatttccctgtaactacaggcaacgaaactcgttggattaaagttgctctgttaaaagaccctagctcagggcagagtcgcttgcaactgatggtgactaacggtggtaactatggcaatacgcacagttctattgactttatcgattgtagcgctagaagcattcccgcaacattaacaagcgcaaacattagttcttatctgcaaattcgtcgaatcggcgatcctggaattgataacactaaccaaatgcgttatagtctggttcgtacctctgagggtttagaactgtggtttactcaacgcgcgtttattggtggtgttaaagttgctctgctgtctatcgctggcggtactgttactgaatattatctgcctactggttacacaatctctgcaactgctccggaaggtttagttgagagtgtggctattcgtatctatgacgaaatgaataaacctaaccttgacaatggtactgatggtattctgtctattgctaaaggtggtacaggtgcaagtacagcggatgctgctcgtacaaacttagggttgggtactgctgcaacccgcgatgtcggcgaaggtgctggtaatgttttagaaaatggcgcttatggcttaggcggtaatggtggtaaatccatcaacgacattatctctaatgcggatatgttgacccgcttaaaatcatacggcggtactttctggcgtggtgttgctaaatctggtgttagtgttcaaaatggtctttatagccatggctccggtatttttatgaatgctggcgataccatgtcagccattaatatcgactatgctagtgctaaagttcgtgtatacgcggctaacaacgcggctcttgccgcaggagatgtcaaatacaacgaactttacggtacagcaaataaaccgtctaaggccgacgtagggcttggtaatctgacaaacgacacccaggttaaaaaagccggcgacaccatgaccggtaacttgactattaacgctaacttaaaagtcgaaaaccctaatggatcaatggttgatttaggttcagagaactcagataagtatagcagattgacccttgcacgtaaagttggtagcggtgctaccgtagcaatgcttaaaattactcctgaaggatacgtgcaatttggttatcaaactgcggtttctaatctagctcctagtaaatatattctagttaaatctagcggccttgaggtagaaggggatttggtttttaatcagacctatcgcggcactgaagaggcagttgatatttctggtaagaccattgaccttaacaacatggttattaaaggcagtgatttaggtactcgtctattatacaagtgtacttctactggtggtggttctaatatatcgaacaaacctacctctgacggcaactttgttcttgaagttctatctttgcgtaaaatttctgataccgattggacatgtaagcagacctttactacaaagaacggtgatgttgaaggcacatatgttcgatactgccaaaacgttacatggtctgcatggaaagaggttgttgctggtgttcaaccaattaatttaggtggtactggagcaacttctgtagctgctgctcgtaataacctcggtgttggtgaaggacagagcgttaagttcggcggattagttgttgatggaaacatcaacgttgcttctggtaattttgttattgcaggccaagctcctactgataactcgcatctgaccaacaagaaatatgttgatgataaggttgcttctgctattagtaatgctggcgacacgtatcttccgttagcaggtggtactgtaactgggcggttaacaattacaggcgatcagttaaaaactacatcactttgggttacgggagatgctgctgttaatggtgttttaactgttgatggaagggctagatttaatcaagagttcattgtatcaacttcggttaacgtccagaacactggtaacactcatttagtcttccgtaaagcagatggtacggaaaaaggccttgtttgggccgatgagcctggtagcgttagtataagagctggtggtatctcagggaagacgtggaatttctggaacagtggttcttgccaattcccaggtgctattagtaactttaacggaattagctcaactactaattatcctggcggcggaagtggcgcgtatttaaataccgctggcttaacaagtagatttagtaatggtgcttatgtttccttatacttccaagaatatgtaggaaattatcaccaggctattcttaatgttaacggctatggtcgagatgacaatttctatttcagagctggtggcgacttcttctgtactcgtaatggttcttttgataacgttgagattcgctctgaccgtagagctaaatctgatattaaagttatcgagaacgccttggaaaaagtagaaaccttatccggtaatacttatgaacttcataacacttctggcggtactactcgttctgctgggttgattgctcaggaagttcaagaaatcttaccggaagcagttactcaagataatgaagaagatggcggtatgcttcgtctgaattataactcagtaattgcacttctcgttgaatctgttaaagagctttctgccgaagttaaaaatcttaaagcagaaattgaagaacttaaatctaaataatgcatggggcttcggccccatcttttaggagaaataactatggcagtaacagggccgtgggtcggaagttcagcaaaggctgaaactggtgagtcgtggatggctcaagctggggccaaattaagaatagggacaccgttttggatgtctaatatgataggacaaagcgtattccatttaattttcagaattaactatgcacagggttcttctggtgatccatctagatatagaggattctttaaaagagggttagcagtaaacataggagactctgcaaaccaaccgacgctgaatgcgttccctggtggagatgtgggttcactagtagctattacaaatatcaaaggcgacccttattgcctttctatttggaatggtcaagataggcgagttaaagtgtctatatttaatgcatccggtggagaccagtatgatgtttatttcagcggaactactatgagtgatggttggagaagatatagatgtgaaaacgctggcggtctcaatgggtattttgaggctagaatggataaccagtttggtgctttattagaatatgtttgataggtaaaccaacaaattcacctcataatattaaatagattaaaaggctacctgtatggtagccttttgttgtatcctaaatatacgtatagtaacctaagaagagtcttataaaaatggctgagagaaatcccgtagataaactagccttatttgaccgggtaatatcgtttgtgatgggtgtgaaaacatggaaacaattgctgataaaaataattctaataatggttatgtttcttatggtagtaacttggtacaaatggactgatatattcccgatgataaaaggtgcccttgtagtcgatacaagggctatcgaaatggaaagaactgaaaagtttaatcaatccgcgttggaacagttgagcatagttcatcttacttccaacgcggatttttcagcggtattggcattcagaccaaagaatataaactattttgttgacattgtagaatatcagggaaaactaccatcccagatcgatcctaaaaacctcggcggttatccgatcgataaaacatccgaagaatacacgaatcatataaatggcttgtattattcatccactaaagcaagttcctacctaccgacacgtggttttgtgccagtagcttatacttttagttgcccttattttaatcttgataactactattctggatcggttttgatggaatggtacgcaaagcggcctaatataccagatatgaagctaaacatcatatgtggacaggccgcgcgtattttaggtcgagtgaggtgattaacgtaatgctggtgttaaattgtgtgttcttccaatagcccgtttgattgctttaaagaagttcatcaccgggctatttttctcgtaaatatcccagactttcaatttgtcccacggatccggaacataatcttcattccttgccgaaacccccaacgtaacccgcctgtatccagcgctgtcgtgataatacacgaagaatggcctacctattggcgcaactttacaacctctcttagcggctctcatagcctcatcgaacgtcattgatacccccaaaaatttctatgcatgaatggtcgaattccgatagtttcactcaaaatgaatatcggatgatctagctcatcgtggttttcttcgtcaatgacgatatcccaatcagtagccttttgttcttctaccgtggcaatgaatacctggtttacttcacacttgcggtgtgtacgtctgatgattgtatccccttcacgaaacacaatcatatcagggttggtagtgcggtacgcggttttacccgcgcacacttcattaagcatatcttcgtatgtcattataaaacctttacacgttgaacgatggtttgtttaacgtctttgtattctccgtgctctttaacggttgctttgaaagtgatttcatcaccttcgtttgcaatgttattaccgaagtaaacaacaacattaccatcaacattaattttggtcataaatctttctacagaagtgtagtaagaaacttgagtatatcccagtgaaatcactttctcaacggttccggtcatttccagacgttgtttgatttcaccgatgtggttagctttagaaatgcgttcctggcgctcttgttcccactgttcgcggatttcttcgcgtttggcgatataatccttctccagtgcaacacccatgcagtaagcacacacggcgtcaaatacagggctgtttttgttgtcttctttagactggtcagcccaccaaagaacagtaaacattggcatttctgcaattacttcgcctttacgcttgccaatcggcatgatccctttttccagcagttccagtttttcagtatcgaacactgacagtttaccgcgacgttcgaacagatcgaaatctgcaaagccctggaataccattttgaaagtatcagtttcagttaaacgggctgaaacacggtcgaaatactcacgcgctttcgcttccgctttctccggatcggtagataagttgcagatatagttatcagaagtataaccgccacctctacgctcaacacgcaaggtatacattgcatttttacgaccagaagaaatgaagtaagtggtagtaactacggttgcgttagtcatggtatttctccttaaagggtatctcgtttcgatatggctaatataacaaaagcccctgaccgaagtcaagggctttttaatcattcattcgaatctttcattgttttatgaagatgaatatcaaaaattttccagtacgcctttccgcgaggataaatttttgctttgtcaatatcgttgttgcttccccatgtgttgtttgggccacgacatcgattttttatataatctgtatgccagaataagcgctgaaccgatgattccgtacctaatggatcttctttactgaacagaatttgtatactcataagaagaacccagtgcgaacaatcagatcgattttcttttcaggttcaaacggtgatttgctatcgatgttacactgatagaacataccaacatacttttcaggaatgttggattcacgcgcccatttcaggttatcatcggtattcggccccagcatgaggttaacaacatcaacagcataatcctgttctttggtgttgccggaaccgtttacataatgcccgtgggcggttttgaggatctcaattacttcgctatcgtcggtttcgacgttgtaaagcgttgtattttcaggaatttcttcaagaatgatcaaagcggttttcatcacacttacctttgtgtttctgtttacgttttgcttctttaaatgctcgcttgcgatcgcggtgagtagaagcgcggttgaaatcatgtttcgctaccaaattattcatataagccccttaaagaaaaatatttaggggctttcgcccctgtatcaatccagcagtttgcggatcttgtctgcgatacgtccggcgcgggttgcacttgcagtatgatcgctttcttttgaagccagttccgccagcttacgctgatgttcttcttctgctgcttgacgatctgctgcaacctgtgcaacctgctcattatcgtgagcaatacgcgcttccagttcagacagggttttgtcgaaagttgctacgatttcatctacagaacgaattttattaaacagtttcataatttatctcaattggttagttttaatcagtatacatcaatatggttgaaattcaaaatcataaatgtcattcagtgcgcggttccactcggtgtagttttcaccagcaccataacgcatttgaatagcactttcgaacgttgatccgttgaggttcgggaaaccgaacaggtttttgattttgtcatgtgctacatagtacagagaagcactttccagcatcgcaaccatcgcagacggttcgtgttcgcggcgcttgatacgtaacagagtacgactagcaccagttttacggcgttgatttggtgctacgtagaaacggaatactacgcgccctgttttatcatcaactaccaggtaaaacccgttttctttcagatccacgccttcgaatttcttgaaggttccgcgtttcatgtcaccaattttaattgcatatttgtgaatgtcaagtcttgtcagaattcttttcatattttttagataccagtttgcctaattttgtaatttcgcctgtttttacgttaacaaacaaggcgatgctcagaaatgggatgctaatcactacgctgatcaatgtaaacagaaaacgtatcacaaaaagaacagcacgttcaagatatcgttgcatccacgcgattcctaaacaactataccctactataaaggtggttgcaacataaaatgcaccaaatcctttacgaaatacgtaacctttcccggattctacccggtcgtcggcccacatttcacgggcggttttgagaatagattcaccactagcgcgggtttcgttagccgaaggcatgtttttaaatttcatgatagtctcctatgcgcccagaactctccaggcgcggttgtttag

SEQ ID NO: 55 - DNA, 176231 bp, unidentified
  source 1..176231: mol_type = genomic DNA
ttagtaatggctaaaaccatatgtaacatcaatcatgactttataacggcatacacgcatttttgcgttattgtaatccactgggatcgctaccacgtcagcaggatccacctttacctgaatgactctaccaacaccgcccccgtagtgtggaaggtatgatttagccgcaacgtgtaggccagtagaacaggtgcgcgttttatcttcgtctaccatgtttcgaggcatggagacagtcacaccaggactattatcaaatttgccagtagcgagatctttatagttatcgcgcacacgtttccaggcaaggaaacaaccatcatcggtcagttcaatgtcattatgtacaaggaacccataaagctggtatacagcatcgcgtgaagggtttcgcatcaaccgttcaaagaagttcaccagatgttcatacggacgatcgttatacatttcgcgaatgattcgttgagtgatatcagaatcaaacactacatctttatatagaagctgatgaccaatgattttaatgttgcctttgctataggttcggatcgcttcttgagtatccaaacaagttacagcacctttgacatcaccagctttcagcatttcatgcgctttcttaaagttcggatgtgtttcacccgccatgaaaacgcgcccttcgtatacaaccgtaatgaacgattcagatccgatcatacgcggtacagtgtctgatactttaggcttttgttttacatcccttttcttagggaattccgctaacttgcggttgataacgcgcccaatggttcgggcgcttacgttgaactgttgggccagtgctgttttacttgcccccgtcaaccatccattatagatagctttctgttgtacttcgtcgagaattttgaccattatttccaccgtattaatttcttaaactcactgagattcttttcgttgttgtaaatcggacgaattgaataagaatcgctatgttcaacaagtgaagccagtaacgggtttagtgatttaaagatttcccatgcctgatcaacacgttttttcatattgctgcgtttaacgcgcattgatgctacggattcacgcagaatcggacaacgcaccctggaaagatttttaccatctttctcatacccttccagacacactatacgttcgagggtatcaacaatcttatacagtttttcattatatcggtttttcacaatccgatcaagcgatacaccgaaacggctatgcaatgcgtctgtttctgttgagtgatccttcccaatccatccaggcaagcaattatctttcaatgccttttcagatttaacatactgcttgcacagcatatcatcaaagcataccagatttgaatccgggatccacttccagaggctgttacgtatagcaaacacaacagggatcccagtatggcgcatgatacgcgataaagtagattctttcattgctgaatccatagacaacccggaattttcaccatctaagcggctatattcatcaataccatacaaccgaacacctggggctttatccagtgataaaaactctgattttatcataaacagagaagtttttgccagattgccgttactatccaactcataacgatatacggtcggggtttttgggcgcggttctgaatttttcggtgcatatagcgcttttgatttttcgcgatctgcatcatagatctctttttcttttgtcatttcactggtacggagatacacaatttccgattcatcaaaatgacctttccgaacgatatcattaacaatctcacgctttgaatcactatcgtaatatgcaacaaagctaacacggcttaggttatgcattttagcatacccgacgatatacggtttaaccgtgttggtatccacttttaacagaatgagtttcttctgtttccacggataataaatgcgtgtgatgtcctggcgtttggttgtttctggcttatacttgctccagcggcctccgctaccagttacctgataccatgcatctttaccgtcgtattcgttcgcccaatacccagcaacataatcatcattatatttgtttggtttgactagttcgctatggatccagccaatagaatcaccattgatgcgaaaattagcatctttaccaacaaagttttgtaccattgaaggcagagaatggaaccacgtcagtttatcacgcacggtttgtaacttatcgaattctgatttaactcgattgaaatatacccggctgatttgtttcagacgttctttaacaatccctactgtcattttatccatactcaactcttcgcgagaaggcatgaaatcaagttcaccgatcgggaagtcaataatatacgtatactggctttctgtatagcaatagaacatcgaggtatcatacaaatctttatccagaggataaatgatgttacccatgcgagcatatacaccgctagtgtatgctgatttatgacggatcaccccgctatcgttggttgcttctttcggctgatagttgattttgagaatagaagcaccaacaaagttaggacgaatatcagtaaatgattcgtatacccttgctgcttcgttttcccattctttgatatcttcaaccttaaccggaacagtgatagtaaccccgttaggttcatcgctttcaatctcatacagaggatcgcagaaaggttccccatcatccatatagattgtgtaaccgcatttgataccgtcttttacggattccaccgtgaaagcatcggaatagcaaagcggagatttgcaacccagacccatagaaccgatcaggtcgtttgaatcatttttagttgattcgaagtaaacggtaaacgcatcactaacgaaatcaggagacataccgatcccgtagtcacgaataacaaaacgaggatcaacagcagttggcaactggacatcaaacgggttctgatttcccgcttctttgtgtccatcgatcgcattacaagacagttcgcgaatgattgcgcggatcttgtatttgtatactgtcgaagaaaggatcttatacgctttcttgtttgcgcgtagagatagtttgtttcgtcccttgctggtatctgtaccaacacggtagatggtttgcggtgtatcttcgcgtaatttcattgtttatttctcacttaacattaaaaataacttggtcacaagagtacttcgttggctttttgttcagaccatattctactacttcgcaataagtgtcaaggaattttaccaatttttcttcctcgacctgctgtttcttcatatcaaggataccccacacgatagccccgataatgatagaaaagaacgcacaaaaaccgaatatggtcagatattttcccaatctaggcgcattataacgtgtcataccttacccctctttgcgaatgtatgcaagttcttcatgggttactggacggatatacagacggccttttgtatatgccttgcgcccgctgatccaaatgtttttcatatccttaacaccgttcatcacatcgttgtaaaacttcttatcagctttagcctgatagacttcacggccttgataatctttcatgaacaaacaataaaggatctcattcttatcaactagattagcatcctttgtagttgttttacttggtgaaggtttcgcacccaggcgcaaggccatagcttgccacactttaccatgttcataaccgcgcccgacaagagcatgagcgatttcgtgtaaaagagtgtctaaaatatcctcgtagatatcttccgcaacatgacgaccagacagttcgatcagttttttagcatagctgcaacggcccagagtttttgtaatacgtccattgatccggaatgtccaaccattactaatcaaaccgtgtttttccatcatggtacgcgcccagtgggttacttccattgcactacgagttttcaacattttagaatctcctttgcttggtacaaaaccaatatagcaaaaagccccctgcattgcaagaggctttgtaattatttcaacttcttagaaagttcttttaaatcattgagatactcaattttaggggttgtttcttcccagtatttcaactgtttacgcaactcttcggcttcatcttccagctttttgctttcgtccgtggttagatggtagatgttcatagccactaacatttcggcatgattctcgcaacctatccacgtagacacaaatttaaccgcttcgctgcgactaaggccacgcagagaatcaggagattctaccatttgagcaataaacgcaacctttgccagtgctttatctaacgcttccttagtctcctggatacgcttattgatgcgctgttgatatacattcatacggatatcaacaaaatcctttagaagcgtttcagggcgttcgtatgagtatagtttaccctcaaagataacgttaatgtttgggtttgagttttcaatcaaaccgaaatctttcaggatcttttcacgggttaacccattagcatactctcgcttgagcgttacttcataccgaaaatcttctttcgatagatccttgtagctaacgataacgcctttttcttccagcttgtcaaggattgcaatgtatttcacacggtcatatttcactgggatctcagtgatcaccaatttggttttaccttgcaattcataggtgccgtaaatcgtaccgtctgtgatttcacctttaaagtaaggatatttcagatccagtgtgaaatctttatcattcagatatgcaatacacccgttaacaactgatttaggatcatgaggcggaatgtttgttgcatatgcttttgcaatcccgctaaacccgttaaccagtaccatcggaatgatcgggagatagtacgctggcggtacatgttccggatcttcatgaactggcgttaaatcaccatccatataaattgctttgaatattggcgatagtttacacttgatgtaacgaggtgcgccaggtttcttaaccaaacgggaaccaaagaacccatcacggtcgaataacggaatgttattgcaccagtgcgccgccataagggataacgcttcttctacagaggtttccccgtggtgatacccatacatagcaacaccgccagcgatagaagctactttctgaaatcccgttccgccctgcatagcagagtgaataaagaaacggtgaacgggtttaaacccgtctaccaggtgcgggatcgcacgtgaataaatcgtgtaaagggcaaacgttagcccttccacctgtacaacatctttaatacttctttccattagtcaaccttagaaaatttgtgttttccattaacccaatctttacgcggatcagattcgtcgccgaagcatagttctaacacttctttgtattcgtcgtcaagtacaatgacatcatacttcaactgatcacccagaacacggtcgtaatcttctttgcgtaaagaacccagccccttgatatatcgtacatcttttgctttatcgcggaacggtgcaaactcatcaagagaatagaaccatttttcctcgcgcccaactttagcgataacgatcggggttcgaatatatcggatccgtttctcagtgaacaaagaaggccaacggctaaagaatgcaagcaacagagttaaaatgtcaccaccgtcaacgtcagcatcgaccatgatgccgatattatcataagtcattccggaagtatcaccaggatgaatattgaggatagccattagctcaaacagttctttgtttttgataatgtctgtaaaactcataccccatgtattcagaggcttaccacgtagcgggaaagcgccttgtgtttcttcgttacggcattcgatgaactgaccaacagcggaatcaccttctgtcagaaacaatgttgtttctacccctggagtatcgataccggaagccggaacgtgtttagcaatctttgcctttttcgctttctttttcgctttggtgatcgcggcggcttctgctgcttgtttacgaatcaatgcggattcaatgatcggagtaatgatttctggagtatccataatcatttttgcgatctttttgtaattcaaattcgcatgattgttaaactcacctgctgtatttgccaatcgctcttttgtttggctatcgaatgcaggtgcattaaagttatgcaggaataccacaagagttaagcattcttttacacgtgctttcgggatctcgatactatgctttttcttgatcatcggttcaagttcagaatagataccatcgatcatacactcaacatgaacaccgccatttttcgtatccagaccgttaacaaaggatttctgtttaaacccgtcctcagtgctcgccagaatgaagctgaggcgattatttgtctggacaatggttttatccccatacatggaagcgtacagcgggaagcgattagagagcgtttcgccgttatatgtgaatttcacggacgggaaagcaacggcaagggccattaagcgatccttaatcacttctttggtttcttcatcgataccagttacaccaaacatagagaagtctggagtaaacttaacagtagtaccctgttctttactggggctggttcggtaatcgatgttctgtgcgccgtccgtacagttaatggttactttgcgtttcccgtttgcagtctcgccaataaaaatcgagctataacagtttgtcaggaaagaaccaacaccattcatacccatcgttacgcggtttttatcatcgaagttagaacccgattttgccatagtccatgccgcaactggtttaggaactattttcccatctggggtttttacatcatcctggggaataccgcgcccgttatcagagattttaaccagattatgatcaatggttacatcaatcttattagcatgtttgaattcagttcggatcgcttcatcaatcgagttatcaaggatttcgttgatgattttaaccaacccttccacgtactcaaccttgcgatattggcccattatgaaacgttcatgcgcttctttgttaaccgatccgacgtacatatttggacgcaaccgaatatgatcgcgatcgctcatacaaaatgattcgtcaacctttgcgccttttttggctggttgtggtttctgttctggttcatcatctgccagaagaaaatctaaactcatattcacctctttgtttaatcactgacattatatagggttctatgaaaaagaaaacccctttcggggtttacttgttataagggaaaccatcacgaaccatttgaggtttatcaaccgttcgttttgcttcgcctccgcaatcacaatctttcggtgcatcacgggtagcaatgcttgccatttttggaaattctttattacacttggtgcatttataggtataggtaggcattaataaatctcttttaaactcaacatcttaactaaacgggctttgtctatgtcaaaaacacattgacgtgcgcccggatacaacttttcaacttcgtataccatgcagacgaaaccaacattgtgcatgtactcgcgttcatatgcattgaaccaacgagaaaggcgctgtattgactgaaacccaaaatataacccagccgcttgaaagtctatgttatctttttcaaggttgcgcatcaatcgattatcgtcatccggcgctggatgtcggtgatcatccatatcaatatagatatcaggattcatacagaattgatcaagccattcagcggtatccatcgacaaataacgattgacatatgggccactttttgtttgccatttttctgtacaatcattccagaaagaacaagaaaattccacacgatatacgaacatgatataatcctcacaagtaaactcaaggtttacaagtacgataccacttatctaatttttctgcaagcatttcgttgataatttttgcaatttcgtaccgtccgtgagtagtacccagttccaggtaaatcacatcaagtgcgcacacaatcgcatcaatactttcttcaacgatattaccgccgcgttgaggctgaatgagacattcgctgatctcgccaacttccgctgataggtgatgaaccacatcactcttcgtgcgtttcttcactttatgtgcaatttcgaaaaacttatcaagtacgatcgtcgtttcttctcgcgttgcggtattctcggatgttgaagccgtgtgttgaacaacatatttcgtaaaatagccttcaaacacgttgaaagggatcacatgaggaacaccattcaaaaacaccccttctttacaaacataatggatttggcgcggaatagacaaaccgccgctgcgttccaaatgccgtttaacgcttgctacaaaatcaaattctttcccgtatccatccaatctactgttataagtgagtagaccaaaagtaggaacatatagatcattttctttatacagattcatttacaatacctttatggtagccaaaaatataacaatcaatcgaaggacgttcaccagggaagtgaatgcattgcatgatgcgttcagccattagatcttctcccatgtataccgaagtagtttcttcgttgtaatgggtatcatacgacgttttaagcgtcatgcccggaagccctgcaatgtgcatgaatttagaattggtgcaaggttttcctacttcaccgttaaccatcaacactgcattagttttacgtgcttttctcatttgaatttcaccccgatttgagatacgttccattcttttacgtcatcaacaatatcataatggttgatgtatggtaaagcaatttttaaattactcgcgtcttgaatgttgcgtaagaaacgagtaggagaaagaagacacaacctctcggatccgttgtttcctttagcggcaaatgatagggtttctcccccgtcaatcttcatatcaacagaaatcgttttgaattctggtgcgtatgacgtgattttgccgttgtctctcggtgtactatagaaacatacactttgtgggacattataacggtctgtttcaatgtacatgtaatcgccgtcagacattccccacacggtgtagagggatccggtatagtcaccaaaggaatttttaaaatcttccttcgtggtgtatcccagagagcgcaattgcataagctggttatgctgttcgattgcatcggctttttgttgttcctgtacttgcgcatcaatcgtttcttgccaggaattatacgcatagtaacccacaacagcgattacagccataacccctacagctttccagattttagagtcttcgtttttgttactcatgctatattccttttaagaaaaagggccgaagcccctttgttaacgaagataaaccacataaccgctttggtcaatcgcgcggtctgcgtcattgaagatattaccacgaatgccttttgctggtgctttccagcttgcaggtttcaggatattaccatcattatcgatgaaagcggcaacagaacgctgattgaacatttcaccagtttctttgttgcgagtatcctgaacaacgcgatgatatttgcggcctttctccagaaagaaaacagtttcgaaaggagaatcttggaaacgagcgttacgcgctttgtacattgcttccatgaaaggggctgctttttctgcgaggatttcgaaagtgttcatggtatatctcctaaagtgtgtttcgtttcgatgtaagtactatatcaaagatggttattctatgcaaggcttttttcgttatccatcaaatattttaagtgttcttttaatgcagggagttcgttcaaatggcgttgcttaactttcttgtactctttgcgttcccagttttcaagattgcttgccaacgcttcatcacaataagcgatcccgcgttctgcatcctgaactttccgtttccattgtgcaactgcttgttgataaagagaaccgttaaccatcataataatttcctcccttgtttcgatggggtaactataccaaagctaccccagaatgttttaacaaaaagtgctattagtaggtatccagtttatacattttgcaccagttcatgaattcttcgaaagtctgagtattaacacgtttttccttcttcactttcttagtgattacaggacggttagtaaaacgtttttgcattttcacagtgattgctactttatcgcccaggtcttcaaccttttcaaccagcgcccactgagaaccaatttcagcgccgaaagtcaaaccaacaatctcacctgctttaacgtgtgctgcatattttactttaaccattttcgtattcctttctctgtttcgtttcgatgaatacaagataccaaaaagcctcccgcaatgcaagaggcttctttaacaaaaaatgctattttatttctttgagtaatttacggatcccgccgccctgtgtcttatcaaagattttctttgcatcaataacagaagtgattatgtggtagttgttaccttttccgtcaaactcaaactcgaccttgtagtcactacgaaatttcacaaaaacaaattcacctgcaaagtgcttacggaactgtttttcgttaatgtccaaccattcctgtgtatcatctaactgatacatgcgacaaaacaggatcgaacccattacaacaatcatgacaaggatagctaacgcgaattctgacatcatttacccctgtttactgattgacggtgtaacgatttaggcacaaccggatttcgatacggtttgactttatggatcatgggttcttcctcaaccaaattaggaaattggttgttccattccatcgaaaacggataaggttgtgacttgaactcttcgatcacacagtttactaaacggtcgccgattacacccaaagccgccccaataatcgctatacgcataaatcaccccttaattgtgtcaagtacagtaaaccagtcatgaagccatatcgttgttcttaccgcgatatacgttaacaaactaatcaatgataccgctccgcaaatagccagcgtaatcaacagccggatttcaaatttagtaaaattcatatcaatctcctttcttagaacccaatataacaaaagccctcaaccgaagtcaagggctttgttttaaatttttaccagttttggtaatcgaagaactataccaggatggatcagacgtgcatccggaatagcatcacggttgattttagcgatatcaggccaaagttcaccaacaccatacagtttctttgctatagaatataggctatcgcctggttgcacgacatagcgatcagattcaatcttaaccagatcctggttaatgatatcatcaaaggcttttgctttcgcttcgttaatcgtgttcccgtagtaatggcgatccataatagttaatgtgatcatcgtttctttcctatgctgttttcgtctgtctcttctaaggatggaggttcttccagccccagggcataacgtttagcatagattagcatcaatgcatctttagcgcaatcatgaatcgaatcatgctgaatgaatccatctaacatgcctttacgcagtggacacgtggtcactccgcgagtcagtaaacggttttcaatagctgtacgcacatcacggctattccagaacacggtcggcatatcttcaaacgtgtcaagtttccctgtcatagttcgtacaacatcggttagcatagaacgatcgaattcagggccgcgcgtataatcgtatgactgccaacgactcacaccgtcagccgctaaatcagcaaagaattgtcgatgaccttcgtacaaatccatgtcgatatcggaagggaacaaaaccctttgcgcttctttagattgctgtttccaccattcgatcgttttttcatctttgatgcgttctggttgtttccggatgtcaaatttgtactttcttcctttagcaatcagttcctgaaaggtaggcggatcataaggatcatcaacaaaaggaacatagctaagttcagctagttttccttttggaaacgggccaatactttcataatcaaatacgaaatctacgggtaaatgactcattcgcgaccccgcttatacgattccatgaaataggccaatgatagcgcgacttccggagtaacatcaacggattcgatcatgcctggagttaccgccatcataccgaactgacgaagcccacaacgagcaatcgatttttccagtcggatcatgttttctacagcctctgcaaaattgtccagatgttcccaatcgtggtaatcttccattgtagaccgatcacttttcaaaatcagatcggcaactaattcagcataaaggcgcggaaggtgaatattcatttaaaatccctcaagcatgtgtttgttttcacgaatgttacgacccattttcaaagtatcaatgatcactgcatactcttcaaaagtgaattcgatatcttgtgaaatgtttccccacgtgtaggtcggcccgttaggacagtataacccaacttctttgtttgcgttgacaacgcagcgcaattttgcaaacaacaaattgatatcgatagaattgaacccttcgagataatcaagcccctctctaccaatacggtcaacttctcgcaaaatcttttctacatctttgactttaacaataattttcataataacctcaaagggccgaagcccttagacataatcaacagtgaatcgtgcgcgggtagttcctacataaagcaactgcttacacaattcataatcggcgtatgcgtatgcatcgcgcgtatacatgtatgaatgatcatacgtgcttccctggcctttgtgatacgtacaaaccggaagtgccttaaccgtctggaacttgtttttgatttgccagaacgaataccagggggctttgtatccagtttcctgtttcatcttcttatactgaaacgcgacgtagttcaaataatcgcctaaacgttcctgcataaccggatccgcaataacctgaatatccgctttcgtatcctcgaacatcgattctgttttcatcaagaaataatcgatttgtaccggatcgcatcggtcagctttgatagtatcagaacgcggtatgatttcaaggattttaatttgctcgttgttgttatagataacttcaacaaacgaaaccccattcacacggccttctgtcactaacggttcttgcatcacaaccacttcaccaacaatgaacggctgatcagttttgtacaagtgtttgcggatcactgcgtttaacttgtctacgtttgcgttagtgtaagcaaacatacggttattattcaggtcatccggagtcttaacacggctaaaataacgtctcaggaagtcactagcgttttcgtgcttcattacccctagttcaccattcatgaggggcattaacggcttaccgtcgcgtatagcgcgtgatacctggatgattgggtttccttctgcctgacgcataatcttatccatgcgaatgacatcaaaaatttcctcatcaaagaacggtgaaagctcggtgatcccttctgtattaaccggacggatctgatccttatcacccaatcccaggatcaccgcacaactcggaatagtacgcttgatgatacggaatagttctttgtcaaccatcgatacttcttcaaccacaaacacacgacattcagacagatcagcggcttttttgcctttttgctgttcaaatactcgtaactcttcgttggttacggggctgattttcagtgctgagtgaatggtcgttgcatccatacccaccgcctcagagagaacgtttttagcctggtgcgtcggtgctgtcaaccagatcccactaatacccagttttttcaatgtttcaaacacaaattttaccagagtagttttaccaacacccggcccacctgtgatagtagtatggattttgtttctgatatttttaatcactcgatcatgtgcatttttctggtcttcgctcagatcgtcaaaagttaattcgctcatactttaatcaataccccttgaatacttgcgtgttcaataaaccaacgcatatctttctttttcttttcggttacggtttcaacttcttcctttcgaaagaatcggctaagaccactttgtttaactggattcatcttatcatgatattctttgataatcgaatttttatactcgttagcatcgtccggagatagaaacaacaaaggtgttaactctccttccttaatgaagggaattttaaacccgtctttatccttactaacgacgatataatattttgtaatcattctcgcccctcataacaaacgtagaatattccaacaaaccaaaacactgatagtataatcagtaaaagttttctttcaacgccatttacgtgaaacacacaccaaccgaaaagatatgtgatcatcgcgcaaacaccataagaaagaaccccaacagctactagcgcgatgatcggatccattagtagttgttagcccaacggcggaggttttcggcttgtttaagagcgtacatcttataaattgtttctgcatccatacccaatgcaataaacttacatagtacaaagtggaattggtcgatcatttcaaacagaacttctaaacgatcctcttcactcagatccgcaaatttagtattgcgcaattcctggtgatttgctttccacggtttccaaacaccggatgcaggtttaacaccgcgagacattccacccagagcggtgtaaagttcgcgggtttcgtctgcgatcgcgtcatcttgcagtttcagccaatcaaggatttctccgcaagtttccagattatctggacgcggaacccaatgcagcgtatcagacaggatttgttgtgcatggttttgtaaatccagcatggattgtaaaggatcgccattacgggccagaaccttttgatattcggaatctacaaattccagatcttccgggttaaccaggtgcgcacatgaattaaatacaggagttttatcagtagtcatatcaatctcattttttcggtgatttgtcccacgacttaaatcgaagttttgccgtgagtccagaaacagtattatctttcaaatactgcataatttcaagtttagttgcgccgtccgtttttatcatttcgttgatatctttggaaggccacgggcatttatcccacattacaaccttttctccagcctcaatcaatttaaagaggcggtgagtagtatccggatgacgtgcttcattgtcaagaacccagacacgcatatttttgtacggaacctcagaaagcgcaagctgtccaccagtgatagcgccagcattatcaacaaataggctatctaatggcccctcaagaagataaaccgtttttaacggatctatcgtatcctgtccgtaaatcttggttgattcctcacaggctttgattgtgatatatttcgactttgcaccgtcacgtaaagcacggccctggaaagattctattttacctttcttatcgaagatagggatcactaatctcggttctggttttgcgatcggataggtatccggattcaccgtattaaccagttgttgccattcgcgagtaaaccacaaccgatcccacttgtcacgggggatacaacgattctgcacatattttatgatcggatgttcatccggcaaggtatctaacctttcgcagaattgaagagtaggaataaatttcttctcttccttcggttgttctgtatgcgttggctttaacgaattgcgatccttaaacgattccatgagataatcacggtaatcgtctggataatattctttcaggaatacgctaaacggtacaccataaccacagttaaaacaaccacaattcatatgatcaccctttttagaagggtagatccaaaatcgttttttgtacttgtctttcattgagtcgccgcaaataggacaacgcgcattgatgcttaatgcccccgatttacgaacgatttcgctttgaggcaatgatcccatgattcgggttgcaaattctatatcaagatacatttcttacctcagttgactatctttagatcctcgtcgattataccccgcgctgatcatttcgtcatgttctttttggcattcaatacaataacggcaacccttcacgatagccctacgtttttcgggtatcggatccccacaatcaaaacaatgcgttaatgattctccgtttctgatttgagaacgtgcaaaatctatcgcattgtctattgttgcctgaatggtatcttgaacaccgtcagcagggccaaatccaaccgccattgtaaatcctcctaatcaaatgatttcaatatcatagactaagaggatttttctgtcaagaacttacttgcttttctgttccgtcaagcattaacttccaaccacgaaacgcctgtttaaacgaataatttattgcaatatcaattttatcagaaccttttcgacgattctgataaacggtcgcgttgtcactcatatacatgatacaaattggaaaccatgtataatcgttagcagtagcccagatagtgatattcagcggaggaattatcatttctttttccttttccctgcacgggtaacgcccaatactttcggcccgatgttggttactgctccagtagtcacaccagaagcaatcttttctgtatcgccgccagaatcacccgcgaccatatcctctaacatgcgccccttatcataatattctttgaggcgtggaacgttcaacatgatttcttcatgctcttgttctgtcagattgtagcgattgcgtagggtatcatatgaactggttaagttcataaacccactcatatacggaacagcattcattctacgcttgatatggcgtactgaacgatgaaaaggagaatacgcttctaactcttcttttgttttggggttgcgaattacttcgccttgtccatcaaggatccccagtttataagcagaccactctgtgaatggttttttgagtagccggatcatccggacgctatatgttaaatccatatttttaactaattgatcactcatgattattactctattgtgaaagtgaataaatcagatttggtttcaggttcaaactccatacaaacaacctcgcatagtggtttaacccctttccaatcctccaggtaatacccagtatctataccgcatccaggattcataacaaggccagtttcatcaagaaactttttgcatttacttgatgtggtgctgtcatcttgtcggaaacagtgtgttttcgaataccggaaatttgcagacatttgagggattatgaaagttccctgacgcgcgatctgtgatgcacgttcgattactttatactcaaattctgcccctgtatacttacccttaaaatcagaggttttgattttaccaaaaggcgggttactgatcgccatatcaaacacctgattaaattcagttgttaaggcgtctccatgcacccaggaggcttctggtacgatacgcttacctaactcatagtatgtgtgatttaactcaacacagacgatttcgcgcggcgtattgtacatcatgtaatgaaccatagcgaaagataacccaccgataccagcacacaggtcaataacacttccacctgtgcaagcatcgattgtgaaatcgcgagcaagtccaataggggtaaagaacgcccctaattcagaattgtttgtaaacgcgccttcatgaaagttttcaataatgaacaacttctcttcgtaagttagcgctttgtcagagtgaaccagatccattatctgattgtgtttcttagtctcttgctttgtcaattttgccattaacatcaccaaaattcttttgcaaaatctccatgaagttctttagcttttgcatcgtacaacaatgcagcaccttccatagtatcagaaagacctatatacatctgttttccgtttgaacggatatcagcgcggaatttatttccatgtctttgtacgccgatataaggaatatctttccttttagaaacctttcgatttcttgaattttctggaagagtacattccctaagattgtctattccatttccagcttcaataccttttatgtgatcgacatactcaggaagtataccataatggatataataaacaattctatgaacaagatattgcttccttttatatgttacaacatgatacccatctgcgtttttatgtccagcaacattcccttttcttgctcgttgtcccacatctgcgttccataaaacatcaccagtgaagacattaacacacagaagaggtaataactcaattattccttctagttcttccttaatggtgcgttttgtcatttcaaaccctctttaacaccctctttcatagctttccaggtagaacctgcttcaccattcagggcggcaaatacaaataataagatagcaaggacaagattcacgccagcaatcaccatgattttgctatacacgaaaatgtaaggcattgccaccacccaccaactaaaagaattaccagttacgatgttgagtgctgcaagtaagaaagtgataacgaatgcgattttcataatgtcctcctttgttatgattaaggtatcatcttttttgaaagaatgcaatacctatagatacaaaaagccccgaaaggggcttaattttttatgcgttattgatgagataccgaagaacgtttttcgcttgttcctcattacaaccaactttgaaaccaggttcgatagggaggaagttccagaggaaatcaacacttccttcaacgtcatctttgcctttttccagcatcgctaacagcaaacctttgtttttgatgctgtttacgattgcgtcaaaataaccatcgctgaaatcaacattcgggttcagcatttcgttgtaagggttgttgaatacgttcattttgaatctcctttgtttaactcagtatcttgtctacgtgagttatattaccacaatggagattcaggtcaatacctttttacgattttttgaaaagtttttcgtatttggcttttacccagcgatacatatcttcggccttgtcactggcaagcagtgagaacagcagatagatcgcagcacccaccaacacaacgcctactacaatgtagacgggtaagagaactgggaagagaacccagaaccatgacatttgcgagaagccaaacactttagcggctgcaaaaatcagagttagtccagtcagcagtttgatagccggaataggaatcgttatagtcttagtcatttcattaccttacattctttatggggctattcgccccagtcaattaaaattgaatgtcagattttgcaatctgtgtcattttatcacgtcgggtagattcagcctgtttaatcatcgggccttgtgtctgttctactgttttaggcatagtgttgccgtggtagtcagatttaaacccgtattcgctgttgtcggtatccatccagcgctgattaccctttcgaacttccaacttgaacttgttgaaagtgttcttatcgccataacgggatttgatttgcttgaacagttgcataccctgatcagctaactcttccgtctcgattacagctaacataaaatcagccgtagcaggtaaaccagcggattccgcaacatcacccatactcacatccgaactatcccatgcagaacgcccaacctgtgcgcctgtccacattacggtattagtttcaacagcaagaccgcgtagttcttcggcaattgctttaaccagaatataggtattctcagcacctttaacacgggttgaagtacagatccccaggtaatcgacaatgatcacatccggaacaaactgtttcttcaatttaagctctttcacaagcgctctaaagtggtttgcacctgcacccgatgtagggtactgcttgaccaccaaacgcccaaccttacccgctttaaggcgctccattttgttcttatagtctgcgtatgtaatgttaccttcgtcgatgtcatccatagtcacatcaagaaggttagcatcgatacgcttagagcaaacatgctctgccatttccatagaaatgtaaagaacgtttttaccctgttgcagataatcagccgcaagagaacataaacccagtgatttaccaacgttaacaccagccatgatgatattcagtgtaccacgttccgcgccgcctttggtgattgcgttcaggatcgggataccaaacggaattttcatcgccttcgattggtaaagcatccaccgtttttcataatcttcgaaatagtcatgacctaccgaactatcgaatgaaattgctaatgcttcctccatgatttcagggatagccccaacaccaggaagtttcttgttctgttctgccagtggtttttctgcgttcgcctggatttcgattgcacgagaaagagcacgatacattgctttatctttgcaatatgtttccgtttccttcattagccaatctaaatcttctggcgcatttttcagcgactgaatcgcctttttcgtgtcttcgtagactacatcacttagatttcgtttgtcaagcgcaacctctaaagcagtttttgacggaatgccgttgaattcctgtacatgtttatcaatgaggtcaaacaaaacttgcgcattgccttcgaaatattcctttttcagatggggccatgcttggacaaaatatgtcccgttataaatcaggttagaaaatattgtatcaacgatcattgtattgccttataccaggttactgaacatcatgaaaaagttgtaaaccttttgtttgaatacatcccataatgtcagtttaggctttgggacaactgaacccttttcaagctctttaatctgtgcataaattgcatcatgcaccagcgggatcaacgcttctttgtcttcgtctggggtactaaattctactttcagaccatgatcccaaaacaccttatgaatataaaccagatgcgcaacacctttttcatcgttaatcagaagttcctgaataacatctttcatcgcttcatcaatataattctttgctttgctctcgatatccatacattgcctcggttatggggccgaagccccatagtttttataaaatttcgttgtcttcttcgatatcatcaaatgattctgggatatcgtcatcatccagatcaggatctgggatgctatcagtgctgtataaatcttccagcgcggaaccatcactgatttcacgatcagggatcttatacttttcttcgatagctttcaagaatggttgatgagtaaacagaggacgccagaattcaacgctatttgtttctgactcacgccatttcttttcttcaacttcgagttcgccagtctcggtattcaggaaagcacggttgcgccagcctttggttacggtctgtacaaagttcatttccattgccagatccagaaggccagaatacatactaataccgccttcataggtaacatgcagcgggaattttgatttctctttcacgaatcgagatttttcgatattcatgatgaaatcataacccaccacctcagtaccttctttcacctgttgtttacccaggatgatcgcagtatcagcggaatacattaaaccagtaccaccggaaataactttcttgctgtacatttcttgtgtgtcatatgtatgacagatacaaaccatcgggatatccaggtcagccagataaggcgtaaccatacggaacataccttttaatgcttttgctcgcgtcatatcctgtttatcgttatcagacagcgcgtcagcaagttcttttttacttgccgtgttgcctactgagtcaacgaatacaatcaccttatcaccgcgttcaagcgcgttaagctggcttacaacgtcattacgcaactgctcgaccgtcgtgatacgagtatacacaacacgatccggatcaacacccattgatttcagataggatttagtaacacctttttctgaatcgtagaacaggcacacagcatcttcatacgttttgagataagccgctacagtcagcaaacctaagttggatttgaagtgtttggacgggccagcgaaaagggtaagaccagaagttaggccaccgttaaacgcaccggacaacgccagattcagaatcggcacacgggttcgcgtgatggtaatattgttgaatacgtcgctttcagaaagtacagatgcagtttggctattcgagtttttgatcagtttttttagtagtgctttgtttgacatttaatttttccgatttattcattgtcattctatatatctcactagttaatgaaaggggccgaagcccctagagtttaccagtcaccgaacagatcgtttaaactggcacgtttttcataatcaattttacatacttctgtgatgttagtcaatggactaataacatgtttttcaaacatacccggataatctacccatgccagaatatcactttcgatctctgctggtagtctatttccagattgccacgcgatgcaatcagcttgccacgggtttttatcccttaatggtagaaccattaccttttcaccttccatgattggtgtaacaccatcaataccagcagtgaaacggttaaagaacaacacccctttaatatggtttggtgttcccttgattggatagccagccccatcacgatatttcgaaatgttgttggcagatgatacaccagcaatttccctgtagtcaagttccttatattcttcttcgaactttttataatgttcgtgtaaagataattcaccttcttgcaggatacggcggatcgcttctttcaggaatactttcacagaggtcggagtactcgaacgctgtgtttccatacccatgattttcaatttcggtttttcatagcgagttccttcggagtcccacacgttagccgcatatcgttttttagcagtccagaaacttcccaacccttcggaacccaacggaggcccagaaatgatttcacgatccataaacatcaggtgttccacgttgttcatgtattcgcaaagttcacgataccctttatcgatcattggttccattctttctttagcaaagcgatccaggaagtcaacccaatggttattatccttaaatttagcctcaccaccaacttttgcaatcacgttatccatacaaacataaatggagtcagtatcacagtatcgaacatatgcatgatccgtagtaccgcacaggtcgttaagatattcgtttaccttacgttcaatccactggatagccaactgcccgaacatggtgatcgcgctggcgtttcgtagatcgaagtatcggaagtgttcgttacccaacgcaccataaagggagttgatagaaatcttacggttaagctgtgctgtgttcgcttgtgcgatcttcttctcacatacgcgcttaactgctttaagcatttgttttgtaagagttttcagaactgctttcgattcatcactgaaatctgtatagaaatcaaagtcaggatcaatcatttggttatgcgcgtctgttaagtgttcgagttcgtgcttgatgagttcaagatttcgctcacccgccatcattcgttttttccacatcttacgctgatcaaatactttcttgatctctactgggatcacgcctttgatatcacggcggaacatccacccgttaggagaacagctaaattcatcgctagggcgcggcgcggtcttattaatatactcttcaagagcacgtaccgcaaaacttcccataatcgtttcagggcttatattcacctgtcggatgatggaagggtacaggcttgttaagtcaaacgataccatgtatttgtaaggcccaggaactggatccttcacaaatgccccagggtaaggggttttagtatggcgtctgttttccggaataacaaccttatcttcacgcagagagttataaatgatcgcgtcccacgttttcagcggagacataacccctgggaagttaatttttgcatagtacgctacagacagaaccagttcaataaagtttcgtttaccgtcgatatcaagtacgcggataacgtcaacaatgttgtacgtgatgtacagttggtgatcgcgctggcgtagttcagacagggaaccttcatactcaactttatttttaccagtttcgtattccgcgatcgcgtccaggcggtaagatggttgcggggtaaagctgaatttcttatacagcgccataccatccatttgagcaacgccggaaatatcatatcctaattgttcgttgccgtaagcgtcagtagtggttctggcggttactttaccaaatgggctaaaatgccttaccacgttttgaccgaaaatgttcaggtatcgcgtgatgatatatgcaatatcgaatttgtcagagttccatccggttacaataacaggggttcgctctttccaatctttgatatacgcagacaataacgacttctcggtctggaaagaccgataaacaattttgtttaaatcttcttcgctaatgtctttgcgatcaacgttttccgcgcaccattccgcaaggccaccctcaaccagatcgtatacatagaatttatcttcaatgctatcgtaatgggtaatcgcatcgattggatattttgcttcacgcggatccggaaattctggggcggtcacctcgatatcgatagaagcaatgcgaatgtgttcgcggttgtattcgatttcattccggtacatgtcagaaatgtaagccagtcgataatcgtccatacctagcgcttccatcccaacatcgcgcatacgctgcatccagtttttagcttctttgatgctgtcaaactgttttttgaggcaaggcttgccataaatgtctttgtatggggtttctacgccattcatagcgtgttgatacattacgggcgcatatttcgtcttacgtacctgttcggtgccgttagagtcaacgaagcgctcgtaaatggtatctcccatttgttcaactgataggtaaaattcattcattggatcttgtcttctccattaatataatgttccattgtaacaccacctacagcaaattcaagtttactcgatgttctaaaaccaacaacccttctgctaacaagtcacggatctttctcagttgaacaagctggcgttcaagtttaaacccgtcgaataacatgctaaaaatactggaattgatactatgatattttgcttctgcaatgccctgattaaccatcatgatagctttgttaaccagtagtttcctttccgttactgtatgttcatccagttgacaggttgcaagggaaaccagatcatcataagcacgttgatcaataacgttatccatacgggccgcgaaaattttattcatgtaagtgcggatcattgcgcgacctccattcttttcataaagacttcttttgcttgttggatcaagtccagagattttttaatacgctcatagaaatgagtggtttcaacttgattgcataacaatgtgtactctgaaatgttacgatcgtaaaatccaggaaagtagtgttgtgcatagctgtaagtgcgggtatctgacagattgcaagttaacgataacaagatgtcatcttttacaatcgggatgatcaaagtttcgttggatttgattgaatccatgatttcgttaatagtcataatatatccctctcaatggtgtacacccaatataacaaagcccctgcacgaatgcaagggctttttgattagtgaccgatccggtacttgtacttgaggatccaatctgctttttgcgagtgggtcagtacgcggaagttgttttcttctgcaaacttcaacccagtggttacgatcttaaccatgccccactcttcgagaagtcgcgcaatgttgttccggcgtagttcgtcttcttccgtcatatcgacttgacgaccatcaagtttcaacagttctttaaaatgcacgataaaatacttaccttgctttttcagaatgtggcacgattgccagagcattttctttttgttgttcgcaataccaatacgggttagcgtttcacggatctttaaaaaagaatcgtcgctgattagttgaatttctaacatacatcaccattgtttaatcaatttttccaatttcttttgttcagctttgtttttcacaatacccaacaaagacagagcgacctttgcgtgttttcttttccaatcctcgaacattccgaggtctttaagttcctgcaaatattccatcgctgtacgtgtatttacactgtatttttcgcgaaggatttcgataataattttctcttcaaaatcttccgatagtttagcccatgcaccgaagcgtttagccttcctaacagagttgagataatagttatagtgcatttggtcagagatactaccgcctaccagattcatcacataagcgttatatatcgtgtctatgtgctggctcattgcgttgtctacaaagtacttatcatacacttcatcgataaccaacggagttttaccgttgttgatttcgtctatgatgttaaacaaggtgttttctttatccttgccgtactctttgatcagttcttcaaccttatcccaatctttagaaagccaagcggattcatgcggggataactcttcttcatccagaaattccgccaggctcatgattacgcctcccagaccatagaaagcatcaggttcatcaacagatattgcagatgaatttctttattcatcgccagcccgtattgcgcgttgttttcgcccacaatctggatcagtgcgattttcgaatcctgattcacgatagggtaaatcgtatcagtcaattttccgataaaggtatcgtattctgacgcatatttaataacctcagagcgcaaccctttatagttcttttctttcagcagggtaatgatatgagacacatcagaaccaacgatctcattcaggatcccagcatcaatttcaccacgtttcgaatagaacccgatcgctttgataatagaacgcgcatccggataatgctctttaacaaacgctgcaatgactttaggatcatacttgatattctcgatttcaaggataccgaaacaacgcttgattaactgtttcatcagttcgatacgttcagcatcagacggaacaccgaatttaacaggaggacaacgagaaagcagagcactatgcacaccgttaatgttgttcgctgttacaataacagaaacgtttttactgtatgcttcgataaagctacgcaagtgtttctgtgcttccgccataccagaacgatcgaattcatcaatgatgataatctttccgcctggtttctgcgtcattgatgaagcaaaacgatccagttcattacgaatgaagtttacaccacagttcgaaccgttgacaaagaacacctcagcatcaacctcacgggccaacacaagcgcgagggtcgttttaccagtgccaggggaatcagatacaagggtcatgttctcaacacgcccagatttgattatgccccgcatagcggctttgtcaccagaaggtaaaatacactcttcaatcgttgttgggcgatagcgctgatcccatgcaaattcatcaggagatcgggagattttaccgtatttggtttcgatgatttcaatattttcactaagttccataatataccttcaaaataaatggtgtaaaagaaaggggccgtagccccttaaaactatcttacttgaatgtgctacttgcttcaagtacgacgacgtaagcaacgccgttatcagaagagaatttcgcggcccctttggaggaaatctctactttgtaatcgctgttgatgaactgcatgttatcaatcttcatatcaaaattgaaaacattgtcgccttcatactcaccgacttcaacagagaaagttgattgactttctttgcttttcgcggtgatgaccagtttaccatcaatcggttcaacggacaggtcggtcagtttcatcatgcgagacgctttgatcagtttttcgaaatcgttagccgtaatctggaaaatcagatctgctactggcatcaccagacgttttttcggtttcgggatcgttgttgcgtctgctgaacgttcgatgatcttcatcttgtcgccgcgaatcacgatttcaccagtggaaatatcatgagtgatttccgcgtcagtgccgacgatgttcagcatgttcaggaatgagttgagatcgtagataccaacatcttcatcaatcacatcagcaatttcagcttctgcgtatacaacgctgttgattgatttcgtcatgatgaatgaacctttggtcaacatgatcgaagagttgatttgagaaaagtttttcaggatatcaatagtttgtttagagaatttcatattcagcctttagttttcaataagtgttacttaataagtgattttacaacggtttccgctgctgtgtcaagcatatcagccatttctttaacggttgtacgcttcggatcttcgcggcgttcgctggtaagtttacgatgttccgcaaccacttttcatcaatgtcacgatagtgtttaaaacgttcctcttgaggcatagctttaaacagttcttttgtttcgtccgagagtttagcaacccaggatttacggacgcggttcatgtagtcaacaaaaacattactttcattcatatatttcttctctaacttagaattctttgagtgggggccgaagcccccgcttgtattacatgtctaacagtttatccaggtcgtcatcaccggagctattagaatcatccagatcgaacggtacgccgtcatcttcgcctaccggaaccgatgcaacaccaccagatgatttcacatcagatgtctgattgtcaaacttagccatttcattatcgaagttgctcagttcgctatcaaggtcagcggaagcgctggaaccagcagaaccgatcgaactacccataactttattgaagcgagtggtcaggtcagccagcggtttgaattcgctttcggcagtaatcggacggagatcgctcataccttcgaaaattgctttctgaacttcttcatcgtcgatgtttttgatcttagccggaacaccaaacgaactatcgtcatagttaggccaatcaccaacttttttcgctttcagggtgaagttagcaccatcaaacggacaggttacagcaatacccggttcatcaagttctggattaccgttaattgcggcggtgatcttgtccatgattttcttaccgaagcggtatttgaacaccttaccttcgttttctggagcgcctgggtctttaacgatcaggacgttagcccagaaactttgtttacgaccgatctggctcagtagcttatcttctggcccgtttttgttggctttagccttctcatacagatcgttttcggaaatgtacttacatgcaggacagccgtcataatcgccgtgggtagaggaacagttctcaatgtaccactggttgtttttcttgaaagagtggctcacgatacggacgaacgccagttcatcatcggaacgtgctgggaggaatcgaataacggcggaaccgtttttctgcgcgtccagggtcagtttccattctttctcatctttctggaagccggaaccacctttcagatttgctacctgtgcctggagtttagcgggatcttgacgtttaaaaatgctgctcatattctgttttctcgtttagtttagtttgattaacgtttgtttcattaagtttcgatattttatgatatctttttcagtaaggtcaaatatttttctgtatgcctttaacttaatgctaaagtcagaccaaataatatcatcagctacttgatcgtgtttatttatgatacctaaaaatgagtcaaaaatcaaaaacgattcgtaagatatcacatttgacaggacaagtttgcttatgtaggacgttgatgatttttcgctgtacttgaacaccagagacacggggatctctttcattttggcgaattcgtacacgtttttaacgtcatccacaaacacgttatctagtctttgtaactttcctatgtactgcctgtaaaagacaatactatcttcatcaacatcgcctacccagaaatccggattggctacgaagttggagaggaatataaaatagatttctttgaatgtaaagcgttgagctaattttacaaagaaatatctatcctttcgcttgttaaaggcgttttcactaactttgatctgccagttgtattgaaggacatcaaaacgcccctggaaatgagttttcatcgccagatataacttgtatacagacaaaggcacaagccgtgaattcgcctcactatcagcaaacggagctttaaatctcacatgaagccgtccagagtggttgatgaactatgttcaagcgcaaccgatgggcgaagcatgtttcctttgatcgcttcgtcgctaatcttatcaaggatcgcgcgaggaaccgttttattcagcatcgcataatcaatggaattttcatccatccattgtagcgttgcttccatgtatgttgccccctcagaggcaaccagattttcgatatacaaaccgacttcggtcttatttccgatcatgctttacgccttatcgatcatatcatacagttcgatcagttcgttgttttcttcttcgaaagcggtacgggcctgttcgtgatacagtttgaacagtttcccgaaggtttttccgtcgataccgaaatcagtttttgctttggatttaatatccttgaaagtaccgttgaagatctcaacttgagttttcacgttggatgcttctttgatcagttcttttacctgttttgctacatcagggtttgtttgtaaaaattctacactcattttgttacctcaaaaatcactcagtttttcgaacatacgggaaagtttgttatccatgaagtaacgttccattttggctttacttccggattttggagtattatacgcttcaataatcgaattttcaatatcttttggtataaattcgaaatcgcgtagttcctcattttctttgtaacgagcggcccattcaggggtcatcaacgttgtcgggtcgtctgcctccagccatgcctctaactcagaggattttaccgctggggcgcgttcgccttcaaccttcgtcacaatataatcatttctaattttaatacaagcgatactatcttttttatcgcctttgatatttttgtatcgcagatcgttacgtggcgaaccgtacttaggcgttacccattttttctggggaggcgaccattgacgaacaccgttatatttctgtagttgtgtaaagtcgctatcagcagaaaccactaatactcgtctaccttcaccaacagcttttttcgtaacaacagcaattatatcatcagcttccgcgaattcaacctttaatccaagataaggcatattctgacggatttcttcgaacacaggattcaggaagttgtttagacgatcccaatcccattctgattcttcgtgttcgatctgacgacgttttttgtagtaccaggctttttgcctacgccagtaatttctgtcatcgaaggcaatcacgatttctggatactcacctttaaattttacaacgttaaaccgtaaagtgtcaagcaccagatgacgaatcatttcgatcgtgatggatgcttgttcctttggtttgaagttgttcatcagtgtagcgatggaaatgttagagatatcgatgaccatagtatcatcgggttccccttcatcttgcatcagcttgttcaagttaaacatgcttgcaaaactgctcatacatacctcaatttttcaaagaacggggttattgtagtaacttacgaaatgaagtcaatacaaaagaccataaaaattttgatcaataatacttgatctgatcaaatttatgatctataatttattaattaataattattttactacaatgatcattgtaggtcaagtactaaaatcaataaattttatataatttagatctgatctatagatcattagatctactttaaccttaaataatatagaatgaaatttgattttgtctacagttattatataatattattaacttcaaagaggaaatatgaatactatgactaaagaaacaaccaatatctacgcagacaatgaaaaattataccctatcctctgtgcatggaaaaagcaaatcgccgaaacaggtgatcgcaaaatgcctaatgagttaggtgctgctattatggatattgcaaacgggctatcacgtcgttacaacttcaaccgttattccgaagattggaaaatggatatgatcgatgacggaatttccgctgcaatctcaggactgcataacttcgatgaaactcgttataccaacgtttacggttacattaacaaagcatgttggcaagcattcgtaacacgtattctgtacgagaaaaaagagaacgcgaagaaatataaattcttccttgagcacgtttacgactgcgaagattcagatatggttagtattgcagacgaaggtttcattcaagatctacatgacaaactatctcagtacgaggcttccgccaccaaaaccaaagacaaggaagcggaagtattcccaacattggaagattttctatgaaagcaataattgacttaaacaaaatattaactgatatcgattacgaaattgacttgctaccctacttcgtaaaattagagttgcaaaacgtgggaatcccggttatcatcgatccaactgacgtaagaaaccccgatttcgaagtagaagaaggggttttgtcttatatgataaacgccgaaactatgatcatggagatcacttatgattgatgaagagaaagaagtactaaccagtgtggaagaagtggatccagaagaggaaattcaacaaaagatccaggcacgtgtagaagccgacgcattgaagcgagcacaaaaattcattaagaagaaccggactgagatcaaacgcctccgtagacatgcagaggaagccctattcaggggtaataaagttcagtatgtgtatgcggttaagaaacttcgtgatatgctcaaacagccgtatacagaggatttcattgatacgatgtggaacacttcactggcatcaattcgaaatatcgtagcttcacaacagaagcactaacaaacaagtagccccgaaaggggctatgagggtcttatgagaaagtacttaatgatcggggatacacacgctggcttgcgtcaggacaacccctggaatgaagaaaacctatacaatgtattcgtgcaaatcgtagaacactgcaaagcaaacggcattaccgaggctttccatgctggtgatttctttgatgtgcgaaaggccaccacacaaaccacgatgaaattcattcgtgaacgtattgtgccactactggaagaagccggattacatatctatgttctggttgggaaccacgattgccagtttaaagacaagatccgccctaactcaccgcgagagattcttgatcagtatgattgctttactgttgttgatgaaccgatgacagtaaatcttgatacttctccgctacaatcaatcgatttgatcccgtggatttgtcaagaaaatacacagcagatttttgatttcatcaaaaagtcaaaatctcaatactgcttaggacactttgaactgtccggatactatttctataagaacagtaaagcggatcatgggcttgaaccggatttcttaaagaaatatgatatcgtgtattcaggccactatcatcacgctaacgaaggcgctaacgttttctatatcggtacacctcttaccatgagcgcgaacgatgaggacgaaaccaggggcttctatgagctatcttatggcgacggtaaacgtgaattaactttcattgctaacccagtatgccaccatcgccggatcacctatccggatcaaaaagatgttgatgttgccgattacaaaaattgctctgttcgtttgattgttcgcgaagttgataacgatttgcctaagtttcaaacaaaactggaagaaacagtttatgagttgaacattgtcgatcgtgtgatcactgattcagaagttgatactgactttgaaatcaaaagcgtatctggattgattagtgagtacatcaacaacatgcagatcactccagaagaaaagaccgaagtatctgcaataatgagtgcattgtatgcagaggttacgagtaatggaaatagttgattacgttaatattttaaacgaagaagggcgatataaagccctttataaaatgtttggatttgatgtgattgttgcagtacagcaggattcctataatgagtatgtgtcattggggttcactctgattaaagacaactatcacgaaacaaaggtttggacatttactgtcctgaatagcatggatgaagattccgtgatatactgctttgatagcacgattacaaacatgattagtgatatatcccaaaggataattgatgaaactcaaatttaaaacattgacttatcaaaatatcttgtcggtcggtaacgtaccgatcgtcattgattttgattcagcaaagaaaaccctcattacgggtaaaaacggcggtggtaaatccaccatgatcgaagcgcttacatatgctctctttggtaagtcatttcgcgatctgaaagtcgggcaactggtgaacagtatcaacaagaaaaaatgtctggttgaactgttgatcgaatacggcaatgatgaatataaaatcatccgtggacaaaagccgaaagtatttgagatctggaagaatggcgaaaaactgccggaagattcagccgctggtgattatcagtcacagcttgaatcaatgttgaatattaacctggtgggctttaaacaggttatcgttctgggtactgctggttatgtacctttcatggaactgaaaacaccagatcgccgtaaattggttgaagatttgctttctctgtctattatcagtgaaatggacaaactaaacaaatcatacatccgtggtgttaaccgtgaactggatacgctttcaatgcagattggacacgtacaacagcagatcgcaacacatcaaaagttcattgacgaacaacgggcaaaagcaaatcagaatacggcgcgttaccaggatatctacgattcccacgtagaaacagcaaaacagattaaagcgcaattagttgaacttcaaacccagatcgcagaatgcgtgatcaatggtgaagaccaaacagcaaatattcaaaaactgcgtgatggctatacacgcctctcaatgaacgtagaacagttgcagcgtcttgaggtgatgtatcgcaagggtggtgaatgtccggcctgtaaacagccaattagccccactcctgaacgcatggaagaaattgccgagaacattaaaaacggtactcagaaacttacgctgattaagaacaagcaagatcagctacagaaaatcatggatgatttactaacacaacaacgtacactaaatgggctgaaatccaaatacgaatcactacgcggtacacttcaaaatgaagttgcagcggctaaacgtgttcgggctgtcatggataaagcacaggaagacgtggtgatcgacgaatccccagttgaaaaactccgtgaagatgaaaaggaacttgattctaaacgttctggatttgtcaaggaaaaatattttagaggtattgttacggatctgctgaaagattccggcgttaaagcgagcatcgttaaacgttatattccttacttcaataaacagattgcgtactatctggatctgttgggtgctgattatcagttcactctggatgacgaatttaacgaatcgattaaatcgctgggtcgtaatgattttagttacgcatcgttcagtcaaggcgaaagagcacgtattaaccttgcattgcttatgacgtggcgcgacgtaaccagtaaaatttctggtgttgatttatctctcctgatccttgatgagatttttgatggtgcaatggatcgtgaaggtgggtttgctgtgagaaaattacttgatgatattgagggtaatgttatagttatcagtcatcaagaactggatccgcaagatttcaacaggcatattactatggctaaagttggtcgatttactaaatgtacgattgtaaacaatgattactaaaaaatgggacgacgaatttcaagccgagattcgtcgtcggttttaccatgtaggcgggattttgtatcataaaacagagagtagaccaacggtgtctgttcctgctggttactattttaaacccggtgatgtggtaaaattcaacaaaacgagaaaaaagaatccgtacttacagatttgtatgaggtatgaagggaaatctaactatctgtacgtgcatagagttgtctggtttttagaatacgggtatcaagttgatcttattgaccatattgatatgaatccattcaataatgatccttctaacctacgagaagccacgacgcaacaaaatcactacaataaaaaaggaaaatctaacacatcctcaatatataaaggtgtatcatgggataagccaacttgtaaatggaaagttggtatacaatacaataggaaaaagatccatttaggatattttgacgatgaaatagaagctgcaaaggcatatgatgctaaagctatagaaatcagcggaaaatacgcgaggttgaacttttcatgaatatgttagaaaaatcttttgaattagaaaccgccccagaaatagagcggttttatctccacaacaattttcttgaagaaaaacatatagttactatgagagatgttgaggaagcattcaaaaataatcctatagagttgacgcgaatcaagaacaacaaaagttctgtttggttcctcgaaaaaatctattgaccgaaatccataaatacagtaaagtagcccatgtaacgaaacgtgggctttgtttttatttgaggaacaataaatgatcactgaatccaaaatgacttatcaggaagcactgaaagttttgggcgcaactggtagcgaaaccagcgctgaaatgtccagactcttcaaacgtgcatccttacgcaatcaccccgaccgtggtggtagcaatgaattaatgcagaaaattaaccaggcttacgacgtagttacaaaaactgggcctagtggcgcacgttctgagactgctggtgatgttcgcgcacgttatgcacgtcaaaagaaagaatgggaagaaaaagttgatgcttactttgtagtggcgaaaaactatttcagcaccaaatttaacgcacaggaatttgcggaatacttcaccaaatacactggattgcctaccactttcaaacaggaagtaacaaaaggtagtcacggtgtttatgcttcgttccgtttcacttctggtgatgcttactttgatttcggtttcaactgcacccctccgaatggacaagggttagccgctccggattcatctgcactgggtaacgtttctgttagtacctttgtactggttggaactaaaaaacataaaatggcaagccgtgattatcaatggggcaaaaacccagacaagatcactccggaaagcctgttcccgtctaaaaaactggaaagcattttcagccctgtacataaaaatatcaaatacaaacgtgctgactacctggcgtcattccgtaagctgttaggcgctgacgttagcggaaacgatatctttgttgaagttggtacactgaaagttcgtttctatcgtcacgtattcatgcgtaaaggtgcgtatgtgtttagcgcggtgtatgatcctgctgtatctaagtatcgtccggctgcacaacttcgcggaactatgttcgaagatgaggacggcgcttgcctggatatgatcgttgatacgttcaaagagttgcagaaactgaaaccgagtgttcaaggcgttgtgaacgcgatcgataagatgaacgcagagtttgcagcgggacatcgttcagcatcttttgttaaacgtgtagctgctcaggaagccgcaccaaaaccagaagagaagccgaagcgcacagttaaccgtattggtaaagaggaatacttcgcagcactcaaagatattggtgctcgtgtaatgcctaccagcggttatgttgaatttgataacggcgctggtgttactatcaacttcaagcgtattgttgtaaaccgtaaagcatactactcattcagtagctttgatttcacgtactctggtcagaaacacattgagtggttgaaaggaatcgatatcgcagaagataccaaaggcgcaagcattagcctactcactgatactctgaaatctttacgtgggatctctgactggaacactgttaagagcgctttagatcaaatgaattctaacttcaaggcgggtaaattctccgcacctcatgtgaagaaggaagcagagcaaaaagcaccgaaacagaaagacgaaatcggcgcacagcctaccaaaccacaggcggctaagaaagatacaccagaagtggaaaaatcacaggctgttcatgcagcacgtgagaaagcgaatatgaacaacactattcgtaaaatgatgactatgttagtcaaagcacagcgcaaagacactccggaagatatcaagaaggaagttgatgcagcaattcaattgtggcgcttgacttattaatcaaatgaattataatgggaactgttaacgcagttccctttttatttgaggaaaatattatgagttgtccaacatggttacgtttggaaaatctgaaagaaggtacacaaaaacggatttatattaatcttggttgggttcctcctaccgattttcaaatggctgagattttaatcaatgctgttaaagaagtaagcgacacttacgaatgggaaaggctctattttcctttgattggtttgtatatgacgcgaaataaatttgaagaaatgaaacttgctgttattcgcgctacgattattaattcccaacaaagatttactttgaaaaatgcatggagttctgaatgattattcaagtatctgtacagggtgacactctgactgtcaccgaatccatcaataccgctcttgctgtatgtcgtgaccatatctcacaaaatcctccagtgactgagatcctggaaattgatgtttgggatcagattgggatgatcgacgcatcatatggatttaccccgcgagatgaagaactatctcgtatcgaatcatggctgaatgaacaggaaacggaatgaaactccctaagaacacaacactactaacccgcgaaaaacttcactctgttgattggtgtcctctggatatcatgatttttgatattgaatctcgcgtgatcaatgcaaaatatcaggggtgtagtattttctctgttgaattcgagaagattcgcggatatgatgagaagtacaaagaaaaactgaaagttatgattgaagcattaggctatattgtaactgttgaagacaacaaaatgtggatcgcaatatgagcatagtaaaagcggtgtttgcattgggaattgatatctatcacgatgatttcgcttttggatatcagcaagggttgccgtggggccactgtaaagaagatttgcagaacttcaaagaagaaaccgcagatagcgttttgatcatgggtgcaaatacgtttacctctcttccgggtaaacttcctggtaggatccattgtgttctgtctggttcaggtagttttttgaaaaccaaaaaaggcgacgttgctgattacgtgatccacggtggcgggttgtctgctgctattggtacaatgcaagcaacacacccagataaaaatgtatgtgtcatcggtggtaaggggttgcttttagattcaatcaataataaaatggttgatgaagtaattttgacaaacatttacggacatcatgtgtataacgcaccagcgtttaaacgtgatgttgcatttactctttctgaactgggtggcgcattattaaaatatgaattttctgatttaaaaactcagtacataaaagaacatgaacgcattgaaaaaatcgtagttgaacgatataaaaaggtataaaatgaaacaatatctggatattattaaacttgtacttgataacggtgttgaatcaactgatcgcactggtgtaggtactattcgtattttcggcgcacaagcccgatgggatctaaacagaggtttccccgcaactacctgtaaaaaactattcttcaaaccgtgcaagcatgaattgcaatggttcctgtccggttcaaccaacgttgaagaacttcgccggatgacctggggtgaaaatagcgataagcgcacaatctgggatgataactatgaaaaacaagctattgatttaggatacgattctggttatctggggccaatctacggtcatcaatggcgttcgtttggttctctttatggggatgatgatagttattatggcggtagtggtgttgaccagatcgcaaaagtcattgaacaactgaaatcaaccccagacgatcgcgggatcatcgtttcggcatggaaccctgttgatcttgatgatatggcattgcgtccgtgtcactgtttctttcagttcgttgtaatcaacggtaaactgtctctacagtggtatcagcgttcagttgatgtcttcttagggttgccgttcaatatcgcctcctatgctctcctgacgcatattatcgctgatatttgcgggtacgaagtgggcgatctggtttggactggtggtgatgtccatatctataaaaatgcggttgaacaggcaaaagaacttttacagcctaaccgttcaccaatgccattaccgattctaaaaatgccgaaggtaaatagcttacttgatttagatcaagaattctttgactcgataaccttagaagggtatcataatcacggctctctaaaagctgaaatggcagtatgaaaaatggggcttcggcccctttcttaacaaggtaagagaatgaatgacattaaagtagtagtaaaatcctctggtgtacgccagccgtttgacaaagaaaaaatatacaaagtgctcaagtgggcctgtgatggtcataatatcgatgttcgtgcattccttgaaaatgtattagaactgatccgcgatggtatgactaccaaacaaattcaacgtatcgctatcaagtatgcagcagatcatatttctgttaaagaaccagattggcaatacgtagcatcgaatcttgaaatgtttgcattgcgtaaagacgtttacggtcagttcgatcctatcccgttctacgatcacatcgttaaaatggttgaagcggggaaatacgataaagagatcctggaaaaatacagcaagcaagatattcaagttttcgaacgtgcaattgaccatgataaagattttgaattttcgtatgctggttcccaacagttaatcgggaaatatctggttcaggatcgcgatactggagaaatctttgaaacccctcagtatgcgtttatgcttattgcgatgtgtctgcatcaggaagaaactgggttagcacaggttacgcatatcgttgatttttataacgcaatttccgatcgcaaactgtctctaccgactccaattatggcgggtgtacgtactcctacgcgccagttctccagttgtgtagtaattgaatcgggtgattctcttggttctcttaacgctgtaacctctgcgatcgtgaagtatatttcacaacgtgctggtattggggttaacgcgggacatattcgcgcaatgggttctaaaatccgtggtggtgaagctgttcatactggtgtgattcctttctggaaacatattcaaaccgctgttaaatcctgttcacagggtggcgttcgtggtggtgctgcaacactgtattatcctttctggcatctggaagttgaaaaccttctggtgttgaagaacaacaaaggcgtagaagaaaaccgcgttcgtcatcttgattatggtgtacagcttaaccagttgatgtataaacgcttaatgaatcgtgattacattacgctgtttagtccggatgttgctaacgatcgcctgtatgatctgttctatgaagctgatcagactgcatttgaagaactgtatgaaagcctggaaaaagatccaactgttcgtaaaaaacgcatcaaagcggttgacctgttccaacttttagcacaggaacgcgcacagacaggacgcaaatacattttcaacactcatcacgtcaaccaacagggtagttttacggttcctgtccgtatgtctaacctctgctgtgagattgcgatcccaacgtcgccgctggatgatgatgataaaatggctggtgaaatcggattgtgtacgttaatggctatcgttctggataacgctgatatcagcgaattcccgaaactcacgcgtattgcagtacgtgcgcttgataacctgctggattaccagaactaccctgtaaaagccgctctgaaagctaaacagcgccgctctctgggtgttggtatcaccaactatgcatcatggttagcgagcaactattgcgactactcagaagcgtatacagacaaagttcatgagctaatggaagcgtttcagtttaaccttctcgttgcttctatggaactggcgaaagaacgtggtgcatgtggattgtacaacgataccaaatacgctcgcgggttactgcctatcgattggtattgcaaaaccgttgatgaactggtagcacctgtttataattgcgattgggaatggttacgtagccagattaagaaatacggcttgcgcaactctactctttctgctttaatgccttgtgaaagtagttcacaggttagtaactctaccaacgggatcgaacctccgcgcggtttagtgagtatcaaatcttcgaaagaaggacactataaccaggttgtgcctaaccagaataaccagattgatttctatgatctgctctgggatatggctaaacgcggtaacaaagggtatctgtctcatgtagcagttatgcagaagtttgtcgatcagtctatttctgcaaacaccaactatgacccggcaaactatgaagacgggaaagttaaaacagaagacatcattgatgatctgctgtatgctaactactacggtgttaaaactctgtactatcataatacgcgtgatggtgctggtgatgaagaagaagccgccgaagattgcgcgggttgtaagatttgattaatgccccttcgggggctttttaaaggtaaagacatgttaacagtaatgaatacaaacccagatcataaccacttagaacaacctatgttttttggtgaagatactggtgttgcacgttatgaatcgcagaaacacaaagttttcgaaagcctgacgcaaaaacagctttctttcttctggcgtccggaagaagtcgatctgtctactgaccgtatgcagtatgcaaaacttcctgaacatgaaaaaatcattttcgattctaacctacagtatcaaaccctgttagataccattcagggacgtgggcctaacctcgcatttttgccaattacatccgatgtgagcatggaaacctggatcgaaacgtgggcgtttagtgaaaccatccacagccgtagttacacgcatattcaacgtaacttgcacattgatccttctgtacagttcgaccaaatccttcgcaatgaagcgattatgaaacgttctgcatcaatgacacggtattatgatactctgattgatgaatgtcataagctgaaaaccatcatgatgctacaggaacaggttagcggctataaaccaaatgatccggctgtcgtgtattataacgagcaatacactaaacaggccactaagtgcaaagaagctctgtacctgtgtatgcacgctgtgaacgctctggaagcgatccgtttctatgtgtcgtttagtttcacctttaactttgctgaacaaggcaagatggaaggcaacgcgaaaattatgcgcctgattgcgcgtgatgaagcattgcatcagaaaggtactcagagtaaaatccgtttgtggcaaatgggtaaagatgatccagaaatggttgaaatctcccgtaggctgaaaaaagaagcaacggctatcttcctggaagtatatgaacaggaaaaagaatgggctgaacatttattctctgttggtgatgtagaaggtgtatcgctgaaaagcactatcgcttatattgaacaccttacagatcagcgtatgcgagcggtagggcttgattcgccattcaccccgatccctaacccgtatccgtggatgaataaatggctcaaaagtgataacgtacaggttgccccgcaagaggttgaagtaagttcttacctcgtcggaaacttgaatactgaaatcagtgatgaagcgtatgcaaaatgggccagcaaatacgcgtgattgtcgggtagtaaacaagtacaaaactgattgggatgtcgatattcaaagaggtacgaagttcggcaacccttatcacacaggaaccaggggagaaaacattttagcgtttatcccctggttccagaatcaggttcgtactggggcgatcacgattgaagaattgaaagaacttgatggaaagaggcttggttgtacctgtgcgcctcttccctgtcacggtgattacatcgcgcatgtggttaatgttttgtgtggtaagaaaagatcacttgactttttggatatataatgtatgaaatctgaattcaacttaacccttgataaatgtggtcgcatcgatcgaagttttgttaagtgtggtgaacttaggcattgtgtttattttattgcaattaacgatgaaatagtatatgttggtaagtgtagggatatgtggaagcgtttagacacatatcgcaatgcaaagtattggagagaagccaaccccagtaacatcttaaaaacgtgtcgattggaaatggctatcaaaaaacgaaaaactgtgaaacttatcgtgactactcacgatgaaaatacatatcatgattatgaaatcaacatgatacgaaaatacaaccctgaatggaataaacagcactatgacaaaggcacaaactaaaattatcaataccctttacaaacaactcatgcagttgtgtggtgaatccgaaacatttttcttcgttgatcaagtaaccgtgatgggtacacctgttcgaatctttaactatcgcatggcctcatatacagactggctaaagcctggtgctctggaatgtcgcggtatcatgtttgaaatggatggagatacccccgtatcaatcatcagccgccctatggagaagttttttaactatgccgaggtaaaggcatgggaagcgcttaacgagtctcctattgaattaggcgaagttttagacgtgatgattaaagaagatggttccttgatctcaactttccttgacggtggatttctggcggtcaagtctaaaggttcggttaaatcagaacaagctatggatgcgcacagcgtgttaatggcaaatcgtgaattgctgacccgcttaactgagatcgctaaagaaaactatacggtgaatatggaatacgtttccccgaaaaaccgtatcgttgttggttatgattctccggatctgcgtatcctgaacgttcgtcataacatcacgggtgaatacatcccttatgatgatctgtttgctgacgcgctgttacgtgcgtatctggttaagcgcgagaatatcgaagtactggatctggatgcattcgcaaaagaagcatatcagaatgaaggattcgaaggctatgttgttctgacaacgaaagggtttgtaaaaatcaaaacaaactggtatgtcaatctgcatcgcacaaaagatagcattaccaacaataaggatcttttcctaaatattgttgagaatacggtcgatgacctgaaacagctattcagttcggatctggtctctctgaaaaagattgacgatttcgaaaaacttttccttgatagtctcaatcgtttgagtgcaaaagcattcaaagccattgaagataacaaagggaaatcgcgtaaagattttgctatcagtctaagcgcggatttgtcaaacgacggtcggatcatcttcgggcctcttatgaagtatttcgaagaaaccgatccacaaaaactggtcgatcgcatcattgaaatgatggttaaaaattacgatcagttcattcctgaacaatataaatgaggttcataatgcctaagatatcatcttgggtatggcctgtaatcgtggggctatctttgatagcccttttttacattgcagtcgataccaaaatcgaaaacgcatcgttacgcaaggatatcaaatctttgcaagatgatgtgaagaaagtaaaagagacaaatacaagcaatactgttatctacgtggaacaaaaatccaaagatcagcagttagtcaaggatgcagggcgcaaacaccttttgtttgagaaacctggattgattgaaatcaaaatcaacaaatccttcgacgaatacatgagaaatttcgataatgaccaatgaagaaaaatgtaatcatgtactaaagtatgtgaaagtagatattgagaatgggatcgcgtattggaagaatccaaccaacccaaaaatagccatcaacgccccagcgggggctaaagataaacatggatatacaattatttgttgtgatggtataaaagtaaagagacatagattagttttctatgttgctaaaggatatctccctaaaatagttgatcataaggatggtatagaggctggagacggcataaacaatttacgagaagcatcacctaccagaaattctagaaatagaggggaaccaaaaacccaaacaggaacaggtattaagggagtatacaaaatatcaaaaaacaatagatatttttcaagtatacgccataatggtaaaggaatatacttaggtagttacgatacagtagaagaagctaaacgtgcttatgaaatgaaggctatggaattgtttggtgaaaattataggagatttgaaaaatgaaattagcaatgatagtattacttggtgtttttctcgttggttgtgctgaacagccacctgttaaggtacttcctacgctacccgcaaaggttaacccagtgaaggtaaaatggaaagtaattgcagacgttagagaaatcgacgggaaacaatacctcgtaatgccatatgatggtaatccttatgttgcattgacatatccagattcattgattttacgtagctggatgaatgacgttaaaagacaaaaggatcaaaccgataatgttctgtgtacgttgggataccctgagaaatgcaaatcaaaataactaaaacgttttttcgtgacataacagaaggaaaagtttatactgcgaaaaaggataaagaaggtctatggatagaaaacgattggaatcgtgatatgtggctcaatctgacgaatgagtataacaaagaactaattgaatatgagatagtgaaatgaatttgtttatgactattggcgttcctggtagtggaaaaactacctgggcgcatgagaaagcccgtgaattgggtaatactgttacgatatctcgcgatgatctgcgtagctctttgtataatgctggtaagggtgctggcggatacaaatacaccaaagctaaagaagaaatgattgcggaaatgcaggatcacgttgttatctccactctgaaagatggtaaaaacgtgatcatacacaacacgcatctgaaagaaagtgataaaaatcactggcgtgaaattgcattggaacacaaagcagattttcatatcgaatactttgatgtgtccattgttgaactgcttcgccgtaaccacaaacgcggctgtgatgcattacccgtttcgcgtgtttgggaaatgtttaaccagtatcgtaagatccgtgggttcgtaccagcaatggaaattgtcaatccccacaatcagaaatgcgtgatctttgatgttgatggtacgctaacaaaagtagggcaacgtagcccgtatgactttaccaaagtgatcaatgatccgccaaacatcccgatccagcaactgtttcacctgtacaaaaatgcagggtataagtgtgttgttgtgtctgggcgtgaaggtaatccgcaatgcgcacatgatacatgggttagcctgttgagttatggcgttgaaccggatgaaatttttatgcgtcaagaaggtgataccaggacagattttgaagtaaaagaagaaattttgtttgacaagattttagataagtattatcctgttattgcagtggacgatagagacactccggtcggaatgtggcgagcaaacgggattccgtgcttacaagtcgattatggtgatttctgattgacatataatgtgggtatgttaaagtacccacacaaaagaggattatattatgaacgttattcgtgaagataaacacatcatggttgaacttggcgatcgcattcgcgtagaaaatctgggcgattttaaccaaaaagttcgtttgttgtgccaaaaaattgctaacaaaattcaggaacagggtaaagctccgggcgggtttgaagttagcgccactccggtttctcagtactcctatattgtgtatattcatgacgtggatactaacagcacccaatctttcgggctggtgttaaatcctattactggctacgttacatgggcggctgtattatgaaagtaaaagtaattgatagagcgatgatcacggatgaatctgtatacccagatcctcgttattatggcggtgttttcggatacatcaaaggaactgatattgatgtagtaacaagtccgatcgccgaatacgatatcaacaaagatcagacagaagttcgcgttactacaatcaacggttcagaatatatcgttgaagcgactcctgattttatcaaacagttactaaaggtgatgaaagatgcttgatcatcctggctctatgagcatggtgcttctggaagcattgaaagcatatgatatcccctgtcatttcggtgaagtaactgttaatactatcgttgacgaaatcgacaatccaaatactttcattgcttgtcttgttcgaaaattcacaagttgttttcgaccgagtccagaaaaagtagtaatcagttctgtttctgcacatcatcgagtgttagatgatggaaagattcaactttactggaaagttctttatcacgtggtgtatcatgaagattgatgatattatgtttatgcttagagcaataagcgcttctaagttctctcaatgtgtctccgttaatgttggtgctgcattgagaaatggtaacgggcgtgtgtttgtaggcgcaaataatacggttgatcctagtcatcgttgtacagatcagtgcaatcacttattagatgataacgggaaactgagtgaagaaaagcgccctgaacattcacaatggtcagatcgcaacgaagtacacgcagaaatgcgcgttattatgctggcggcgtctcatgaacaaatcaaagacgcaactttgtatacaactcattccccttgctcacaatgtgcgaaaaatatcgaattttgtgttgcaacaggtatgattaagcgtgtagtatatctacataaatacgatcgtggtggcatcgagtggatatggcgtctacagcaatacggtgccgaagtagtacaacttgatcccgaagaattgaataaacatttccggattaaataaccaatgagtaaatgtatgtctgaactgagtgtaaaagcatcctttgaatatgttctgattgaaaccaacgctaaagcggctggaactgaaattgtatcaccttctggtattgtgactggtgttcgtcaacacggcgaggaaccgatctacggcacagtgttatcatgtgggccggatgtaccggaagaatataaaaccctgcttatgggtaagcgtgtaccgcttcctcatgcacaaatggcaaacgtgccggatcctgaactgattgcaggaaaggcaacaaaagaagaagctcgcaagtatccggttaaatatgtaaccgcacactataaagcgattcaagcaatttacgaataagagatccaacatggctaaacaaattcaagcaatcatcgccgataccgtcgcaaaatccaaaaaacttttcgacaaaggcgacatcctcgaagcaccgacccgcatcgatgtaatgacttcaatgatcattgatgctcaccagggaaaactaaattcccgtgcttcggaagtaatggaatacatcgtacagttcgaggatgtatgcaaatacgccaaagctgttgatccggctgttcgcgaaatctaccgcaaacagttctaaaaatattggccccttagctcaataggtagagctaatcactcataatggttaggttcccggttcaagtcacgggaggggccaccaaacaaggcaaggcacttagagaagcgggaggaacagaatctgattctgttggttgtaggtgcaaatcctacccttgccaccaaatttgggtgcgtagcgcaatgccgttaaatggttcggaatatgcaaccttatccacaggaaaggctctgttggtatccggtaataggttccccggaatgcggggtgaagtaaagaaacttccagcccactaattttaatgaggtttatatgaaatttcgtgaaactgtgaaataccataacgcggtcgaatatacacagatttttgttgatatgtctcccgcaaaattcaaagaacgttatggcatgacatttaatgaatggaaagatggattgcccgatggggattaccgaaaaaacttcaaattcagtgaatgttatgtggatgatgacccttacgatctggatgtttgtagtaaaacaacacctctcattgagaattcaccagaacagctttacgaatcttgtattgattctgcatacgaaatttaaagagataacatgaaaaatttacaaaaactgtttaaaatgtctccggcaattagaaaaatcatcggagaaagcaatccaacgaatcgcaataaaaaattgatggaactttttgtaaaagagttcgatgattttgattctgaacttcataaagcgcttgaggcatattccaaacaagggttctttgcatcgccgcaagtgaatagtaagaaagagtatagcgaacgattctttgattgggagattgtcaatctcgttcgtagaacaaatatatctccgagcaatcatcaattgatttctcttgatacttcggtattctttatccagtatcttatcagtggtggtttcaaaaatcctgaaattccgtttacaaatgaagcggttagcagtgaatttgatgaatcatttgtatacatcaacacaaacaaataatcaaatggctatcttcggatagccttatttttggggtgtctatgcgctttttaaagtatgcaagttggatcgtactcgtccctcttgacattattactggagtattagcaattctgtttgccccgtttgttgtaccattctacaacgagaaaacagggcatcttcctaaaggcttccggtggatggaaaccttcgataaccctattgatggtgatggtggacatatccgccgttgggcgtccatacgctatcatctgggggcttttggggtgtacatgcaacgtgttggctggttgtggagaaacaaggcttataacttcgcatatcacgttttaggacgtgaagcgacaagcaaattcaactggaaaggcaacccaaaaacagaaggtgggccgaaccctgtaaatcatgggtatctgctcatgtggaacgaatcagcatggggtttgtacgtttacaaaccgtggctacggatccacaaagtgcaattctgtttgcgcgtttatgctggatggaagctgaaacaagaagttagcgacccagttaacctggatcgtgcaatgctggcgtttcatttcaacccgttcaggtattatgtaatcaagtaaaggtaatacaatgaaagcatttcaaattttagaaggtttgcatactggtacgatctatctggaagaaggtaacgatgttcggatcgtagtatcaaaaacattaactatggattctgtgatcggcaaagctcgcgttactccgtttgcaaagcgtgagatcgagatcgaatatcagccaactgttaaggtggaaggtggacaacatttaaacgttaacgtgttgcgccgagaaactctcctggatgcggttgaacatcctgaaaaatacccacagttaacgatccgtgtttctggttatgcagtgcgttttaactcactgacccctgaacagcaacgcgacgttatcgcccgaacctttacagagagtctataatggcaattgatgatatcaagggttataaaccccatactgataaaaaagtagaaacggtaaaccgtatcaaagatgctgaaaatgcattaggtgcaatcctggaagatatcgaacagcgactatcaaattcagatattgattcactgatagaggaagaattagatgaggtgcttgaacgtatccatcaaattcaactagcgaaagaccgactgaaagaagcctctatgtgggcgtgtcgtgcggtgtttcagcctgacgaaaaatattaaaaatcaagccgttgccgaaaggtagcggctttttcttttttggtgtaaaaagttgttgactcccttctcacattcccttatagttaatcccgtagacaagaaaacacttttatgaggatgacattatgaaacgctcttacaacatgaatgaactggttttcttcaaaactcgtcgtgaagcacgtgcttacgttctggcggctggtaaaaatacttctgctgctatcgatatgggtactgataaagctgttggtgctcgttgggccgctgttatcgttatcgctgctccggttactccggttaaaactctggtacttggtgcgcgtcacgccgaaactcttaacactgctgcaagcggtaggggccacgaagttaaagtgttcaagaagcgttcttatctttcatgtgcaaggggttaactatggcacgattcatatataaagtggaatacgaaaatactgagttatctgatacctttttgaagatgattcgtgatcacgggcaacgtctggaaagagtaacgattgatactgcgtttgattgtcctgttgggttggttctaacattatcttgcagccccgcaaaagaatcagcccgtgttgaaatgttacataaactaaatgcattttatgaaggtggtagtgtatggcgagtattgtaaaatttttcaccgactcagtgaaagaaattaaaagcgctctggaacaatggaacactcgttgtgatgtatccattaaatcagagtacgaaacaacttatgatcgttatgatccggcccgtggtttgcacaataacccccatgaggtggaagtgtgaaatactacggattcaaaacgagtcattttggtaaagcgtatcgtacagaaaacatcgatcgcaaacgtccgtactatgattctttagtacgcgcgggacgcaaacgcgctcgccaggaagggaagaaagaaggtgaagatcgtggataattggaaaacatgggtatcaattatcgttggtgttatcatcggtcgcggtttgtatgatttaatattttcggcgggggttcattatggacattggttcgggtagtcagtacccatcatgcgcgttaagcaacttcgctccgcatccgtttacgtttgacggggtagaatgtgcatcaatggagggctttttacaaagccttaaattcagcaacccagatatgcaagcccatgtatgtactctggtaggcaaggccgcaaagttcaaaggcaaaaagaaaaaatggtggactaaccagaccttatactggaaaggtatccctattcatcgttcctctgaggcgtatcaaatcctgattgaaaacgcatataatgcgttattccttaatgaagggtttcgccgtgcgctggcagcaaccggaaaaagtaccttgacacattcaatgggaaagaataagatgaatgaaacggtgctcactgaacgtgagtttgtccgaaatttaacccgattgagagatctgttatgagtgaaaaagaaagagtagaatgcgtgtttctgttcaaaggcgcgattaatccattagcgttactgtatgcgcaacatgcattacgttcaacgttgattcagagtgttatctataaagcaggtgtgtattatgttaccatcggcgcaaataacatggttgttattgaatcctatgttaaggaatgtgcatcaaacggcgttgtctttgataaagtcgattttgatgcaggggtagatgctgtttatatgtataagggttgatatgagttacgtagtttatttcgattgttcggatctcgatccgttcgtgcttcaacaggcaaagaaatatcatcaagatgtcgttggcattggtgtaacaaatgatgatatgttgtgcatcgaatttgaatattatcggacatttgagcgtgaacaattcctgggtgaattgaatgcattcaaaagtacccttttctttgatcgttatgaggttatatcttgaaacctgttattcttaccgatattgacgggatcgccgtaaaatggcaaagcggcctcccgttctttttgtctaagcacaacatgcctactgatattgcattagaaatggttacagatgaaaaatttcgtgatatgaccgaaatcttcggatgtgatcagcagttggctaaaatccttatggaagaatacaataacagttctttcattcgttatctgaatgcgtatgatgatgcattgattgtgatcaaccgtctgaaaacgcagtatgatttcgttgccgttaccgctctgggaacaacaccaacggcaagccttaaccgaattgctaacctgaatactcttttcccgtctgcgtttaaagaggtgatggtcgtgggccacggtgaaacaaaaactcatcgttacctggaagcaaaagcaaagtatggtaatcgtctggtttgctttgttgatgatctcgcgataaacttaaacgaatgtcataacgtcattagtcagttgccgttattccatatgttacgtggtgaacgtgaagaaacaaatgcacctcaccagttagtaaaatcgtggtttgaaattgaagagaaactaaatgatcttgtcaatccttaatgaacttgcgtctactctgaaaaccaaagagaaagaagcaattttaaaacgtaatgccgataatgaattattgaaagaagttttccgcattacgtatacaaaacagattatgttttatgtgcgtcaatttcctctggtagaagggaaaccaggcacaacaccgctttccgatgcaatcaaagcattactggaagatttagcaagccggaaatatacaggcaatgcagcgcgtgatcgtttactggatattgtatcatcagtgaacattaacgatcgtgaagtgctacgccgtatcattaaccgcgatctggaatgtggtgctggcacaaccttaccaaacagggtatggaagaaactcattcctgaacagcctcaatgcctcgctacgccgtttagtgaaaaggctttacgtcgcatcattttccctgcttactcgcagcttaaagccgatggtgcgcgttgcatggctgatttgctggaagcattaaaccgtaaggtatcgagagcgggtaacgagtacgaagggttaactcagcttgatatcgatctgaaaaagattcgcgattatctgggatatgatgtagttctggatggagaattgatttatgttccttccggaaccgtaccaacattacctgaacctgaaacagacatgcctttttctttatctgctttcatggacgatgatgataacgacattgcgttatttgcggaagaagttcgcaaagtatcgtccccagaagaagaacaggccgaagcaaaacgcgaagaagggaacgggatcgtaaacaaatctctgaaagggacgatcaccgaagaagaacagcgaaacattgtttatgttgtttgggatattattccatatgaggtgtattacggcgaagctgaaagtgttcagacttatgatgagcggtttagcctgttgcgtgatatcctcctggatctttctctgccttctgttcgtttgattcagtctaagctggttaataacattgcagaagcgaagcaggactataacaattaccgcaatgacggtaaagaaggttctattctcaaaaacagaaacttcaaatggaaagattcgcgagtagccgatcaggttaagctgaaaaacaaaaccccgattgaactacggatcattgatatctacgcgcacactaaagaagaccataaggtcggcgggtttgtggtggaagatttatccggaatggctcgaacgaataccggatctgggttaactgataccgattatcgttacgatgatgatggtattacccgtgtatacattccattagatgaacgtggtgaactggatcgcgaatacatcatggcgcataaagatgaatacattggggccattgtagaaatggaagttgacggcctccagaagtcgaaaacgcgtaagaaaggggaaccggaatacagtttcttccttcctattatcaagaagataagacgcgataagaccgaacccgacgatattcatgttgtctttgcagatctattttaataaaaagcccttgactccggtcgggggctttgttatattgggcctatcgaaacgtaaatcactaagagaatatattatgactagtagttatcagaaacacaaaacccttatggcaaacctgtccggtaaacatatcgacgaagtaaaatctctgctgacagtgaccgaaggttcccgattcgaaacaaatcacattatcaaaccttctgtgaagaaagtactgaaagtgatttaccgacatccggtgtatcagtgcgttcatatcatgaacagcaacgcatttattttcgtatataacgaatccgatgataagtgtgttggtattttccgaaaacctaactttgaatgcatgagcgaagcggctgttgcaaccccgatcgttgaagaatatccggattatgttcaacgcaacatgcgttatgtgcaatcccgacttgattatgcatacgatttcaattctgacgcggtagaagcgctggcggatatcctttgcaaaaaccagaaagatcgtcaaatgacaaaatatctgactgatccaacaccgccaacaattcgaatttctgttgaagttccgtttgaaaatcatttcatggcagttgaagcgcttgctaaacttggtttagaagtgaaaacagaagccgtttaatagcactttttgttaaagaagcctcttgcaatgcagggggcttttttgtatagtgtgttcattgaaacgaaacacggagataaacaaaatggctcacatgatgaagaaagcagaattccttaacctggttaaagattgcggattcgctcacttgaaaacttttcgtggtagtgtttacctctatgaccgcgaaatccaggttgccgaagtctattgcgcttctaacatgcaagaatctggcattatctctgcaatgaaccaatcaatcaaataccgtaaatggatgggctgattatgaaagttaacgtttcttatgaatctcgcgttaatggcgcacagtggcggaagctggataacggacaagtggaaaggcgcttacctggttccgatgagtggacacttgcggcagtgttggaaaccgaaatcgatctggcaacaaaagacggtattttgtttgaggtgaagaaatgatcacactcagtgattatcttctgtttactgctctttgggcggcttcgatattcataactgctttgatttacaataaacgtgatgattttgggttgtgggtattcattcacgggtttcctctgtctatgtggatcgtgatgactgctgaaattctccattaatagcactttttgctaaaactatcttgttcttgtttggtatattgtgttcatcgaaacgaaacagacaaaaggaacatcacatgaacttcatcgatatcaacaaagatttagaaggtaaaaacatcaaactcgttaaccgtgaaatgttagagagtcttggtaatggcggcgaaaaattcagtgaagaattctataacaatttatcgttgatgactgttaaacgcgttgatgttcagggtggttctggttgggtttctgcaattccggtttccctggtagatcaagcaacatatgacccagttgccgattcatgggatctagaaatgccgttggtattcgaagaagtcatgaagtgctacgaaatcgcataagggtattattatgaatagcggaaaattacaaatgaaagttagcgaagaagaagttaaagagcggttatcggtagcaagaagattccttgaatctatcgaccctgataaacttggaaaatgccctgatacgatttgccttaattgtgggcgttctgttcttgttggtaagtgttgcgataatccaaatatagttgtgatggaaaaggaacaagtatcccccgaaacatgggatcagatccaggaaatcattaaaaaccctccagcgccaaccaagaaattacgtgaattgatgacaaggaaaatgaaatatgagcaaatttaaattgagtgcaaccgttcgccttattcgttggaatggtgaagagatccgttatgatgaccctgaattcgcccatgaaattctttcacatcgtctgggattgaaaaacgcgtcattggttcagactgttaaaacatcagcagatccggaaatttggcgttgtgttatcctggatctcgataacaacattgactatgatgatcctaagaactatccgcttctggaagcacaagttgagaatgctccagaagacagacagtgttttttggttgagttaccacgcgaacattacgaaaacatcataaaggcccgtaaaaaggtcaataacaatgttttcgatctccacctcggattgtttgaggattaagtactgctagttgtgttcgtagtagcggcgctggtaggttcccccacctgtatacattcaagtgtttgcaggtggaaatcttttgatacgtctcgaacacattcaacaatcagatattttcctgcatactcttccccaaatacctcaatgattgtccctaccttaacatctaaacgaccctgctttatatcgaatcggatccggcgttcatagctggatagcaattgcattttagaagcctggaacggtttaccttctgaatctgggttctgaaagttggtatcatagattgcattacggtttgtgaagatccatgtattctctgtgtctgtatcagccagtatatcaccgtacatctttttatcagtcaatgacagactaaagaaactggcgtctttaaacagcgttgtgttatccttatgggtaatgtactgggcttctgtgaatatgacagtatccccaacaaacacgttatcaacgttaaatttgtatgctgggatcggtgtctgggccagaatgtcagttgaacttttaaggaaaataccggaaccatcttcccacagataacagaagtcagaagaaactacactttgcccgttgtccctgatataatcaaatatatcctgatatgtaccatttagacatccaggagggatacgtatgttaccgccgacaacttcgggggtaagtagtttcattttgctatacagtgccgtcatacactctgtaatcgtctgtacggcgttgttactaaatgaacgggcaaacttacgtctgaacgttttatgcagcggagagaggttcatacgcagcacagaacggttcttatcgtcagtatctacgttagagtaaagcaatccgtaataatgttgttcctgtgtaccgttatactggaaagatacctgtatgatcggctggataagttgctgatagattaactgtgcgtcgtatatctgcatcagcgtttccgatgagccgttaatcatcgtcttttcactaaacgagacaagagcgggtagcaattcagtatatgcgttatcaatgtatttttcgtatgatgtatataatttaatcgatgtgactcgattgacgattttttcagccataaaaatccctcctaatatatcctatttactaaatagtaaataatgacccaggttcaatttgaggcaataatgaaaaataaaactcttgataaatttatgactacacggcttgaaatcaagaagactaacgttaaaaccgttcatcttccggatggaacagccattgagatccctaagatgtcgtatcgtcattttgtaaagattaagactctgaaagatgacccagttgcgatcatgcgattcatcattgatgacatcaaaccgcgtgaactgacagcagcggaaattgaatttgtgttgatccatatgtatgcacacaataacgctgattatgccaatacgcttaaagaaattgggctaaatcttgatgacctcaaaatctccgaaccttgctatgattttacgtttgacaacgtgcggttagtctttgacaaacccagcctgttaaatgctcaccttccgttcctcatcaaagaggcatatgttgacggtaagccagtagaattaactgaggataaacgagacgaattaattaattgcctgtaccgattcgaatatgatcaggtatcgcgtggtgtcctccaggaagtatacattatccatgaggggaaaaccatcaaagggcttaacatcattggtgaatgataatggctaactcttatttcaacgaagaacaaaagaaaaagtttctgaacagaaacagcaacaaacaaccagcggtcaccaaagtaacagcctcccttgatgctgaaagcgcccgtgacctaaaggaaatcaacgataacacccttgaaagtgcaatcaatactcttgatatcaaagaagggttgaaatcgttcgaagaaaaattccgtgacaaattcgcggggttcaaagaacaatacgaagaggataaaaaggaatcattagccgaacaactacctgatttcgtcggcccgatccgtcctatatccttaaccgatgataactcaaaaactgttgacaatacagtaaacgttaaccaaaatggtcagttcggtaaactggaagaaaacaccgaatctatttttcatgctattaacaaacttgttgatttatatgaaaatactgataagcataagccgcttcctgaaccagtggaagaacctgatccgtatgtagacactaagaaaaaacgcatcaatgatgatgatgacaaaagaagcaaaactctggatagtattgctaaaagtctggtttctattaaaggttttacatcgcagatccttagccgtttcattggttactctctggaagcaatggcaaagtttgctaaatggacgctccttattggttcgttaatctttacattcgatgtgttgcgcgtcacaatacgcaaatggttcgaagatatcctgaaagaaggggaatcctcaaagaaactatttggtacatatctgggtaacgtaaaggctatcgtaacaaagatcgaagaaggtttgaacaacttcaatatgaacaacttaggcgaatcacttcgtgatttgttcgttgagcctatgaagttgttggggcaaactgtacaaacggcaatcactgagggtatcggtcgtcttattcaatcattgggtgaatcaactggcatagacagcattaccaatgccggacgcggaatgcagatcaccgctttacgtgataaacagaaatttggtcttgaattgactaaagaagatattcttatgatcaagaaacaggaactagaagaccaaaaagcggcattagaaaaagaagataaagctattgcagcacgtcatgcattaacaataactccttctcaaattcctaatggttctatctataaagttgctcctactgattatcaagaaagaaatcagaaaaccgtagatgctgataaagaacggcttgataatatgaagaaagcaacggaagaaatgcagaaacaatacgatttagctaaaagcagcgaagaggaagcacaaaaattagccgatgaggaaaacaaacgcaaccgcgcacgtatagaagaagcaaaaaggttagaacaagcgaggaaggaaggaaaacagccgccagaaggtgaagagaaaaagggtgatgatctgttgggtaaagcaaccaactatgctaactctgaaaatctggatgcagccgatatcaaatacattaacgatgaactgttggatcagcttgaaaaacgtcgtaatgaaggcaatctggacgatgtacagaaggatagaatctctgaccttatcgagcaattgcaaaacaagattgcagcccgtacagaatccagcgccccgatcgacgcacagccaccgttagcagcaaataaaccggatgctgataaagcaagcaacattcaggttaacaacaaaactgttaacaacaacgtaactcattcagtacaacgcacagagcataaaccgctcgtagcgctggcataaggaacatataatgaagttttctattattgatgacagtataaacactctcaaaaatattaaaaatcgcggtatcccctctgggggtgccgcaatcacagaatcagtattaaagcaaactatcgttaccgccgaatttccggcccaacgtgcagcaggtatcgataacgcttataatgcttcgagtctgtataataacggccttctgttcactgcatatgattttaatggtgttggtagtaaagacaactatcgttcattacgtcaggcagcacagaacccaaaacaaatactatcatctgcgactggtaatgttaagtacaaacaagtgttgaatagttctattggtactatggaacctgtttgccagatcctgctaccgcgaagcctgaacgataacgaagtaaacagccaccgctatcaagatgcaaacgatagtttcttaaccaaagggttgagccgtgttgtttcaaacatggtatggggcgctgtagaatccgtttcaggcggtattatggcagaccgaagagaagcccttgatgttggtactaaagccgctttccagggttctgacaagcgaacaaagatgtattacaatacattcgtgatcgaaagccgtaatgatttgctggaactgattaaaatctactatctgtttactgttctgggatatggtacaacttctggcggtactgctaaagaggttgctgcattggttaaacagtattacggtgttctgggtgctaaaaccgctaacgcaattagcccttccagtaacccagtaacagcgtcagattttgataatagtctgggtaatgacgtggttgatttcatttcaaacgtagaggttattaaatcgcctcctgtctggtttattcgtgatttccagtctggggattccttgcgtttacctcattcaacctttgggccagcaggtattaccagtgttcgctttggtcgttctattgataatattgtaaatacattaagagaatcaccaaataccccgatctcacttgaggtcgaaattcaatttatggaactgatcgatatgcgtcaggattctatttttgatacaaattactaaggagatatgatgttttacaacgtagatgaatttttatcaggtatggctaatcgcgattttcagcgtagcaacctgtttagcgttgtatttgcaaccagccctgcatcacgtatccttgacaacacgatcggtagtattcgagatactttgattgatggatctattagttctatcaacgcaaacaacccgaacgaattcattaatgctatcactggcggtgtgagtaaattgtttagttacaccgtcgataaggcgattatgtcgctgaacaaaacaggatttagcaaaatcatcggggcaattagcccccgcttgattacttccctgtttggtgatagcatgtatggacagttgttagctgaattccgtgataaaatgatgtataatatgggtttaagcatcatgggagttaacctccccggtaaatccattgggtacgaatacgtttataatggtggcgtacctcaaatcagattcactcgccctgagaatggggaattgtcgctgacgttccgcaccgattcagaagcccgtaacctgaaaatctttaacgaatggatttccgctattcgcgatgatgtaacaggacaatacgccttcattgatgaagtgacaagtactattcaggttaacttacacgatcgtgatggttcaccgcatacaacatacgtatttcagaagtgcttgcccgtcaaaatcagtaacagtgaattgagctatgagaacaacaacgaaatctggacatttactgttgattttgcctataaaacatcatgggttgttgaggctgataaagaaggctgggaagggttcaaacaatccgtagaggaaggtttagccattgcagcacgtaccgcaattacaggacaataaaggggctacggccccttttgaggatcttatgtttgatattattcgagtaacattaccatcagggatcaaacgattccctatgtttacagttaaagaccagtttaaattaatgctgacccgtattgatatggaaggtcggccccttaaagagcaacaggaaatactggatgaagtgctggatctgctttatcctgggtattccaaaacagaacaggaatacattttcagccgggtgtattgtggttcgttcggtaaaaacgttatcaaggttgtgataggcggtaaaggtgggggccactccgaagccttcatggtgattaatgatattcaactagaaaatgaatacaagttgaatgatgaaatcacattagggtttaacttcccccgtacacgcaatacaagcgaagagttgtttcttgaatgtatcagttatgtaatatacaacgaacagcgctatgaatggacatcactaaccgaagaaacgaaagagaatattcttgatatagtcgaacttgatgatgtcgaaaaaatagttactatgctaacgaaatcggttgatgtgtctatgcgcggtaaatcatttagtggtatgttaaccctgttcaagatcctgtttagtcgcggggatctggatgaatttgtgaagaccaactatctgctaaataaaaacggcctgaacctggaacctatcatgaatagtagcccgatggaaaggcaaatttatactgcattgcttgcagaagacttgaaaaaacaaggtgctgttaaatgagaaagcatgaatataaacacgttgagaaatataatgttgattatcgtcctctgacacatacagagtttacccccgatgtagattttatcaaaggggatgtttacctgtatcaaagagaatatcttttcattctggcacttctggaaagtaaaaatattgatacccgtcaactgttcatcaactgtgaagaatgtcaggaaagaattgaattccagcttaaacgcaatcaaataatggttgaagatttcgacgataagctatacggcaatgacgggatcgcgttatctgttcaccctcgtaagactggtgatgaagagatccccgatcttatcgattacgtaatgatagacggcgaacagatcatgtggagtgattgcagcgacaaagataaagaaatggtgttggatgcaatcgactatgcaacctataaatcgatttctaccgcactggataagccagcagtggtcgcaaacattccggtaaggtgttcgtgtggacatagccatatcgtctctctgagaggcttacagcaatttttaaaggtggtctaaatgggtgtaaatctgaggttgctatatagcgatatagaacctaacatgcaacgagattggaataatgacgtagcggcctcaaaaggggccgcagcagtgagaaatagtttgattggtatcgtaaccacgatcaagggtacacgtccatttgatagtaactttggttgtgctattagtgatatgctgtttgagaacatgaaccctctgacagcggaatcaattagaacttctatcgtatctgcgatccggacatatgagcctagagtatataatctttctgttgaagttattccacagtatgatgataactcagtaacagtaaccatctattacagcatcattgatgacccggatgacgtagagcaaatcaaactacagctttccgcatcataacaaaaagccccttcctttcggttggggctttcttttagaattcaatgaatcccattagtgtttgatatcgcaattcaaacggggagatataactttgcatctggttttgatcggatacgatgtaataatacacctcatcattatcatcatatagcgcttctttgatgatgcaataacgatcggtttccacgttcacataaagagtatccatgtactttgtaactttggaaccctgtgaactgatttcacgaatagcgttatctatgaaaagcgacaatgcttgcatgaagttatcaaactcaccatattcacagcccataatagaaattgcagtgtattggtgccagcctttgattgtgtctccacggcggatccatccaatttgtctacccccgatagatacacaccacactttaccaacgggactatagaaccgcacaacttcttttaataacagggacatgatcccacattttgtataaggattcatttcaacctcatttcatatcaagtagccaggaagggctagtttcaagcgaaattgcagtatattcgtattttacagtataacctttgaaaccgaaaggaatgactgcattttcattgagatattttactttatgctttgcttcttcttcattcagagcagcacagactgttgtttgttcaacgttaccagcaggagaagtaaatttttcaatgataatgtatacgcagttcatcctattgccctctttccattttttcaagtttcagtgtatccacttgtagttgaagtttaagaatacaacctttcgatatgttatacaagtagtcactaacgatttttgactttacctgatcgtaatcagaagataacgtaatccaatcatacatcgtttggtatgatggaagatacgtacattgttcttcttttgataacgctttaaatgattggtaatcggttggaggttccgaagcaattgcggttgtggtcataagactaagtgcaagtagtagatatttcataatgtattcctcattgttttcgatagaaccaatatagcaaaaagccccgaccgaagtcaagggctttttcatcaatgcaagaaagatttcacgtactgttcgatcttttcacgacatgtatcaactgaggtgctttccgcaattacggcatgacataacgcctcgcctccgacccagaaactcatcatgtactgaatatcacgaccttccatttctttttgatgcgctttgattcgatcgaaagcgttttcgattgtttcagtagcagtaagcatttcggattccccgtcaacctccgccagttccccatcgatcatttcgctttcgacttcttcccagtatactatcgttatcatgcattaccccagtggttaaccgtcgtaatccccgccacaattcacatcgccttcaatgaacagttcgcggttatcacgtaataaattatactttctttcgagttcaggcccgaacgcgtcggcgtcttcataccagctataattgtatcttccgcattcatcatcatattctggttcatcaccgcgctcgttgaagtgaacaattttaatatcgtccatccccagttctttcagcttatcccagatatacgaaatctcaacgctatgggaaccgaacgcttccagtgagatcgtaccgtcgctatcgacttgaggaacaccccacttcgaacgagtatcatcggtgatcatatctattaatgactcaatattattctcaccgtagatatcagcaacttccttttctttaccagggcgaacaagtccgatcccgataataaagctactgcttgagctattgctcacaaacccagaacgaattttcatcgcatcaccatattaccaatcatgaatagagggattagcgcgaagacgataccccatagaatgaccttatcttcacgacggtcacacccataatagataacacctccagcgaaaatcaatacaacaactgaaacgaacgcgaataaataaatcatttgcaggtatccattctcatagaaacttctttcaggatcttattcagatcgtgaagcgcatcttttacgttaccttcgttataggtaagcatatcctggtacagccctttcaagcaacgattgattacatatgctttttcagaaggtaacattgtaccagagcgattataatctctgaaaatgtccatcatcgtgccgttgttaccaggtaatgacgggttgaagttaaccataccggacatcaaactatcaacatacacaactgttgtgttatcagaacgatacgcgccaccaactttaaaccagttgctgaacacatacggagattcccgcacttcgctcaaatcggttccgatttcatcgatgtttacacgaatgttgttaaaatacaccgattcatcaatagaaccatgacgccataagatagcaccattgttatttttgaatccgactacatcaacctgccagccgttatctgttaaccggacatcatcaacgacgatgaaatcaggtagctgtgaatgaaagccgatgttttcaggacgggaattacgaaacccatcacgattggagaaataaaggatgtcgccttgattcagttcgcatatattcataagatttttaaagtccaattcaagtaattccacaagtcacctcaaagccccctttcgggggcgagatctcattagagtttaacttctttttcttccagaacgattgtgcaatcaaatttcacatctttccagaattccgctgcaacgatatctgttgcggtaacgcttacgctggtttcttcgaaatccagatccgcaaaccatgcgtgtccgacgacaataccgtacattacacgactcaggcgattattaagggcgcgaacctctttaatagtttcctttgtctgcttatcaagatactcgatcaggtcattcttgtcaagcgcttcgatctctttagatacggtatcgtaagcccacagaatgatcaggtcgccattgttgagtttcttcttaccttcggcgcgttttgcaacggtagccgcaacagccggaagtgatgaaacgcctttgattttcacgttcagttctttcgacatgtaaacatcagtcgattctgtgcgctcaaccttcggagagaagccgtaatcacggatcccttgctcagacaaccattcaccagccgcctcaccaaagcgctgtttaagcccttctgcgttgcgtaaaccaatcgcgttatcacggaagaacttcattaccttctgacggcctttcaggatttccagacggacgttatcagcaacaaattccttaccagaaataccgcgagtcatcgaacggttaaccagaggcagagaggtaaagtcaaccagtacagacatacggtcttcaccaattttagccagcggtttgatagtcagaccagaagcacgtaagtttttcagagtcggaatatcggtttccagcggaagtaccttaacgttcacgataccatctttaacaatggtaaagttacgcacttgtttggtttctactttttccggcaatccaaactctttttgtttgctttccggaatggttacataaccttgcagatccgtattgatggaaatgttcggacgggaactgttacccaccaggtgtttcactgcaactttcgttgtggtttgggtaaattccggtttccatacttcatgcgctaccagttgcgccgccagtgctttacgttcttccggagtagaagcgtttgcaatctgttctgacagtttatccagagtatcatcatctttctggacagtctgacggcctgtacgattgtacgcccagtgttcagaagacaggtcgatcacggtgtcggtttctgccaacagttcgagagcatcaaccaaagtaaacgcgttttcatcaggaaccatgttgtagtcaacaccatccatcagacgtttagccggatcaacaaccgcttcggagatcatatctttagcgttggaataatcctgtttggtaaagcagttatcgtatgctttaatcagacgcacatcacccagctttttcagaactttccatgccagatctggattcatggtatgaagcgcatgatacagaaccacatacagaacctgttcaccttctgctgttgccggatcgaagccgtcaacgtcattgatcgcgttttcacccagcgcccaaatgtttttgatatgttccggaaccagaacaacaccatttgcagcattcaggacatacacacggccttcatccaggtagatcgcatgagttgcatcgccaactttgacttcaacacgtgcggaggtttgcgcggtaatgatttcatcaaatgcaggtacatacgcatcaaacccttcaacgaatttgtgtaatgcgttggttgcttccgccattttttccagcagaggacggtttacataataaccatattccaggaaagcaatgttgttaaacgtcaacggcagagtagaacacgctttcaggatatcatcagtacgccagcagttatcataaccatcagtcaggaagatcagactgttcagattgccattatccgcttgcagatcggtagcgacttcaaccgccagttgcagaggttcaacgaagccagtacatccggtcggacgcagataacgatcgatagcatcattgattttgctcaggtcggatacagagctaaccttttcgcccacgaatacagaaccgaactgaccacggctggagaaatacagaatagatacggtatcatcctgcttaaccagcgttgccaggttgtttttcaggtgctgacgaatgcgcgggagttcgttatacatcgatccggatacgtcacaaacaaaaacgtggttagtcggggttggtttggctacggcgtttttgaattcaatgttagtgatcataattttctcatttataggtaaattttattaaaatttcgtttacttttttgctaatagtatctaatgcatcatcgcatccaaacttactactcaacaatgaaacaaaatcatccatcgttgttgtttgagactcgccaacgtcaaaagacagagcgtaggcaacaggatttttaatccttacgatttgaatagtatactcattcaggtcaaaccgttcaagatattttcgcaaagaaaataaatcaatcggtactggtagagtttgactaaacgttatttcttcccccagttgataggggggcatttttacacagatttcgtattccatcagtgatgactcttcatagtgtgttccagattacggaaaatttgcccgtgttcaagctgggattggaattctccgcattcatcagagtaagtaaattcataatcctgattgccaaatttagagttgtactcttcatacaaccacatcttgatcagagcgtctttctcttctgtttccagatcataccagtcacgcccatcataagcaagcgcaatttgaggattagaccgatatcgagtttcggcgctatcttcggtttcccattcataacgcttatcatcatagtatgattcgaagctatttcccatatgaccgcccaggtcgcggtgtacctgctgtacaacttcttccgctgtcgggcaagtcatccagctataaccacagttaggaacacagtcacccatcatttcgcggagattgttgatatcagtcggatccttcgggaaccgtacaataaagctacttgatgaactattgctcacaaaaccagaacggattttcattataatttctcccactcaaacgttgtgaaatgttttctttcgtcatacccaacagtacaacaatgtgttggctttcctgtgaatccatcaaacacagttatacaatagtaatgcaaagatggaagcggtgtatgcttaatgtagttgatcgcgacgttcaggtcaacagtagaacatacacaatcagacgtttgatcaaaacggccatcaaaaatcaactcaatgctatagatgttcatctttcacttccttcatatttttcataacttcttcaaaagttacggggatttcgttgtactgtagtgattcatcatcccatacatcgcgatgcccgaatgttgaactttttgcaatgagtttttcattttcccatacatcaatagtaacatgatcaccaagataagggaaattaggaactttgttcagcacatcaacacagttttgtaatgattcagaaacatgaacaatttcagtgaattcataatcagcactataagaagctacgtaaatcatcaccaccccctaacgatgctaatcaacagtaaacccaggatccagaacacagcaaccgcacaaatacgggccattactacatttccgcgactagtccactccgcactaaggaacaagagaacaaacgttaacgcgtataaaaccatttcaataacttcggtaatcatataaacctcactgaacataacgattgtagttgatgtgccacatgagactagacacaacatcggaaacaatcaaaaggaacaaaccagcaatcattatcaaaaggataactaaccaagtggttccgatattttgttttaacgacaatagcaaacacataatactgacaaaagcaaggaaagaaataacaagcatcacgattgaaggggccataatataaacctcacgaaaaagccccaaaaggggcttgattaatcaatgtccgaacacaccacgaatagactctgcgaatgcatacagttcaggatttttagcttttactgtttcgatttgctccagaatgtaatctggcttgtatttcgcaccgaaccagcagtaagagaaagagcgatcccacatgaacacgttatagtattcaccgttacgaacttcaaccatcacataaccaggattagaacccagcggataatctttcagaagattgaatttcgcgccagcaccagtacatccgttaaacaggtcattaaaagtcatggtatgttccttttgtcagtttcgtttcaacaaggtcactatactattcttcgttagcctatgcaagcgcttttttgatttgttttgcaattgcttcgatcaccggaacagatacagagttaccagcttgtttgtacgcctgtgttttgctcttatgcatcttgaatgaatccggaaatccttgcaaccggaaacactcgcgaggtgataacattcgagggttcttaccttcctgcaataccagacattgaacaccatccttatagtattgggctgttatcgtcccagtacacacagaatccaccataacggcctgataaccaaaccccttgccgtttgccttgtttcgttctttacgctctctaaagcccttccaggcacgatctgatatggtgtattgatcattatccggttcgagaatgtcaccgacccttgttggggtacgtggaggaacaggaaaactaaagaacactggatcgcgaaagcagacaataaacacacgctctcttcgttgaggcaatccaaaatcttttgtattcattacctgataatggatatcgtatccttcgtcctgtaacagcctgtagatggttttaaacgtgtttcccttgtcatgggttaatagctggggaacattctcaaagaacagcacagagggctttttagcccgtataatgcggagtatttcaaagatgatagtaccgcgaggatctaacatgccctgttttaaacctgctttactgaacgcctgacaaggaaacccagctaacaggatatcatgatcaggcacatcattttcatcaatggcgaatatatcaccctgaatattttcatcgccccagttatcagcatatgtttgttgtgcatgtttatcgatttcagacgttaaaaggcattcgaccccgccgaatgccttatcgaaaccgagcctcacgccaccaacaccagcgcaaaggtcaattattttcatacgtcgaaatcaacctcatcgattttgtatgattcttcgccaatatcagcccatagctgaatattcacactttttgcatcacgataaagagattgaccacaaagcccacctgtataacaagtttctgtaatctcgttaacttccaggcggaggctattgcgcataattttaacaacagccttttccattgccgaatctagggttttagtatcacccaatactacatctttaacgttcaaaataacatcactcattatcgccactccgtttcaattccgtgtttgtatgcgtcaacgcccagaggggtgatcactaaacacatatcagtatttttcgttggtgaactaaacgccattgatgcgtaacctttttgaatcagggaatcacgccctgatttactgggaacatcgttgaaatccaaatccaacatttttgacgagtatccgtaaagtttacacagaacatcaatttcagcgccggataatttcggatatgtcatttgtagtacctcacaacatgttcagaatacacacgttcaatgaaatcattccagaaatcgcgatcaacttctttcggataaccagatacagcagccagtttttcaacttcacacatcgttgattctagcgcctcttgtacggttgcgaaaggaacaccgccagctttaaccattttcaaaaatgcgctatccggaagaggatacacaatatcaccttctttgaaaatctgaatcaattgcataccaccgcgcaacgcatgagaaagagctttccagtcgatcccgttgttggcttctgcttgccgtgcgcgttccccgtattcatcccagagtttatacacggattttttcatttccgctacggtgatcgtagactggaatttacgccccagaacttcgtaaaattcctgacaacctgatttcagtgttttgtctgtaacgaatcgacaaaactcgttggtcgggaatcggttagaaatctcaccaactttgatgcgcttgccgtagttagattcatctacgttacccagcaatgatgtgccataccaggaatcaggaatcgtctgtaacacatcgacaacttcacgcagtgcagccaggcgagaacctttaacgccatacttcgccgcttgcttacgaacataaccaaacaggccagttagttccgtagtgtagaagcgtgaacggttagcgcggagatattgccagatatcagagttagcgatcagtttgctatcatctgcatgaagcatatcaatcgccacggtgtcaccatcacatgcgaggctaataaacttttgcagactgtaaatctgacgatctacgtcattaacaccgttctttgagtttttatcgccagttgatgtatcgatagacttcttcgcagtgcctaacaggatttcgcgaggatgagggagatagatccctttgtagtctttatcgcttgttggtgtttccagtccgtacaggtgagaaccgaatacggtttccataatcattttcatcagaattcaacctttaatgtttttgcgatcccgcgcaattcagcggtagtaatatccggaatgtttgttccgtagctattcccaaatacttttttaatcttatcacacaaatcgcggcgatacaccatttctttgtattcttcttcgctacgatacagttgataacccatccacccctcagcccacccggaattgcgcttgattttaatattagtacaacaatcagaccacaggtactgacgcgcaactttttgtacgtaaagggttttggggttgcgattttgtcgctggtcactacggatcccagcatcatacaacgtatcaccaactttcacatcacttaaatcaatcatttacgtctccaacaattagttttttcacagtagtgaacgggaacagacacgcccaacgtttctttactgcttctgttgtatgttatcacaatgaatcgattttcgccacccctaacacactccagatccaaaatctcgcgggttcccttagtgttcatgtctgcaacatagtattcttcgttgttgacaatcactatatccgacataatcaagcgaggtttcatgcagcatacacctctgattcatcaagccattccagattctgattgagtgattcaatcagctttttatcgcgtctggaaataacaacggtagaacctttttctgccttcgcgatgatatcaccagaagaagtgatgtattcaacctcataatcacggcgagggcttccgagtttatcaccagggactacattccgtttaacagattcatgggatttttcggtgaataccaattcattctctacatgggtaacaataccatcaacagcagaacgagaattaatataaattttgctaatttccgccatgaaaacactatctctcagatatcgagcagtcactttatctaaacactgagaagacactttatctccgccaggatataccgagataatcattacatgaccctgaacacgggcggttcctactttatgcagaatgtaaaccgttgaaccatcagaatctttagatatcaagatcacactgaatgattctttcttttccttccgagtttcaccacaggtaaaactcacatccagaaaatcaccaactttaacggcacggggttttgctacttgttcacgaacactaataacagggatcataatcatttcctcacagtttcaaattcttcatcagatttccaatatacgttaaaattacgacaatcatgatcggatgtcaacgtgtatttttcatttgttttttcgtcagtgataaccatagtttcattctcgatcgagttaacaccgtaaacgaaaacattctcaccacgtttgtttaaaaacgcatcacccttttcaatcaactgccaacaggtaacaggcaaaccacccggactaaccgggcgggtaacaagacaatagggatgtttaatcatttaaattcttccattgcataggaagtaagatctttgaaataccttgcggtgttgccttctgggttgtttgtaatctccatcaggataacagcactatcaactcctgctttcttagccatgaatgaaagggcttcggtagcaataatcgttgctttcataacatcagctttagaaacgttgattgtattcattttttcttccttttcattaatcacttggtatgtgtgtataatacaaaagccctcacgagaacgcaagggctttttattaaatttcgtataaatctggattcacaataaccgcacataaaagatcatctatatgtgcggcttcttgttctaaggtttgcttagatgaatgtgctttcaagcaacccccgtaaaggcgtttactatctggaaatgatcatcgaagaattccccttgtcgttgcacgacctcatgcataggtagccagaacgcgtctgctgcatcatcagcaccgcccatgatacgaggcaatgaaccatcgttattaggttcgagcttgatatactgtgctacagtcggttttgagaagtacaccgaacgtttcggatgatcgaacagcatcgaattacggatagaaccacgaataaccttttcaggtactttaattcgtacttcttccagcaattcacggatcgcgcaatcaaggaacgtttcattaccgtttttgtgtccacccggaagcgccaacgcatctttaccaggcgcaaacttacgacgaattactaacacgttgttattacatacgaccactgaatcagccgtgcaacagttcagagaatccggatacggatattttttgaacttgtcaatctctcgttgccagtgtgtatcttcatgggacaaacgttggaattcttttgtttgtgtccattcatcgataaaggaaaccgtagtgctaggcgcatattttaacaaatcttcgtcccagccttcatggtgttcccagataattttgcgtaaattggtcgaggacagatcctgatctccaaccttcacaggttcaaccggaatatgattccatccgaatgctttaagccagtaagaatctttgtctttttcgtacccgacgatcgcaattcgatcatttcgagtttcatcgattgccatacgaacacgggatttccatttttcctcgttatagaggtaatccggaatgtacgcgaatttgattctggctgcatcttcaacatcaagtttgcagatagaccagcgagtgatcattgcttgacgctgtttagcggtcaatgggtttaatgtgttcggatatgcataagcagaaccgatcagaatgtaaaccgtatcagcaacagcaagggcttcccttaccattttctcatgaccatagtgaaaaggttgaaaacgtccaattactacagctttatcatatttgtgtttcataacgtgctccacgtttaaaggttaatcataaaacagacgcaattatcaacacaccaaacaatccaccaacgaaaccaaagaatagtgaaatgagtatagtcagtacgatctgttttatgttcattatagtattctcgttttagatgtcaagcccccaaagagggggctttaaaacattatttacgagaatcgaaaatcactttaccagcataatccgaacccattacagtttgaggtacgccacctttatagcgggtagagtagttcatctgtacatccagttctttccagcggatcatttccggtgtaatggtgcgttgcagggcggcgttggcttctgcttctttcttcgctgcatacagacgggcatcagcatcacgttcgttagcgattgcagcgttttcacgcgcctgacgatctgcttccgcttgttttactgcttgtaatgaagtctgttctactttttgcagttcagctttagcagcgttaacctgttcttcgcggatcttcgtgttagttacctgttccatgataacttccggcagggtgatatcctgcaagaatacctgtttcacagtgtaaccgtaaggccgcgcataatcttctacttcctgctgaatcgcaatttgcagttggttttggatcttcgcatcaaacaggtcttgcgctttcggtacggatttaccaaattcgcgaacagtggaaagtagtttttcagttacatacttatccagtgcctgatcctgattacccgcgttgatacggttaatcggtgctttgctaccgtcgaattgcagcattacggtcatatccacagtggatttaaatttatcctgggatggaacctgtaatttgtcgaacttcatcgcgatgtctttggtgctgaacgtgtcgaacgttgccagcgggtttacaatgtggaaaccaggcagtacgggtttcggtgatactttacccatgaaggtttcagttttaaccgtaccgtcttgcacaatggtatacatgttaggcactaaccacagtgctgcaactacgcccagagcgatcagagaggttttcttcgggttgttcacgatagtgtttaagttcatcataatttccataagttgttgttcaattcgatagttattctatcatcacatttcacgctgtcaaactatttttaagaaagttttgtcagcttgtagattgtttgatagcacaagcccttaatctcgtccaggatgttcttcaaagaactatctactgattcgtagatctcgtttgcttcgttggctattttacggagatacgccaccgtgtcaagcacattttcggtttttagcacaggtttgtatcttcccgtgattcctatgtggatttcggtgaatttatcaaccaaatcctgcatatcttcgtaaaaaccctcatatgctttatgttgtgagtaggaacctgttgcaaaatgtgcgctatgcatatacgtaacggacataaggcacatgccaataaaggcatctatcttgcttgagttctcggattctgtaatttgtttaaatgattgcatgatgatccctttatgaacgatggatacttgcaaactcatacgcgaccctgattcctagctttgcgcattcggattcagatcggcattgtttttggtgccattttcgttccatgtagttgtagaatagttcgcttgtatttacgctgggagggatcgttgtgatgtatacttgaagggccgcattaatataatcgtcaaattctttctgaaccggacggtcggcggcgtgtgttgtgggtgtcatcatcaacaatccgaacagcacagccattgatatgcgtttaatgttcataacaattactcttttactcatagacccactataggtctactcctgtatatatttatagcaaaaacgaggccgaagcctcgttataatatttttgctgtaaagtcaatcaagtaatgtcataccaacacaaacttctttcgaaagcgcgtattttgttcacgttttctacgttttcatcccaaccgatcacaccagctttcatacgtttcagttcctgacgtaaacgggtacgtacttttgaatcaattttctttactgcaatagaaagcattgcattcagatcgccatgagctttgttaccgtcgcgacacagattattatcaaatcgaatgtatgcacatcctgatttgtgtttccagttggttgagtaccaacgcaacccatccggatcaatgccatgttgagcataataacgagaatactcttttacttcttcgatcttttcgttagatgaaaggtcacgaagaggattgtatttcttacggtaagtgcgactcataatgatctccttttgtttatgcttccactgtatcagggttgttctttagttgcaagtaatgttttcgacaaagtgaaacatatttgtcttcggccccgatctcaatctggtcgccattagcaacaaattttccatttgcatcaatacgggcaacggtagttgctttctttccacaatgacaaactccccgcaactccctgatctcatcagcaagtgccagcaacatataagaaccttcaaacaagttcaactgaaaatcggttcttagtccatatgtcattacgggtatatctaattcgtcaactacccgacacagatccatgacatttttcttggaaaggaattgtgcttcatcaacaaacacgcaagaaaccagattctcgctatcactgtaaaaatgattgttgtgaacatcataatacaagtccatatcaggcgtgatcatggtgcatgttgcttccaacccaatacgcgaagagatactctgtttaccttctcgcgtatcaattgctggtttgtacatcaggatccgcataccgcgttcctggtagttgtatgcatcagtgagtaaacgagcactctttccagcattcattgatgcataatgaaaatatagtttagccatttatcctctcaacaaaatctggggtattttggaatttcccttccccttcatggtttttgcatgttttatttgaacagtagatccaccaatcccactcatcataagggggtttggtaatgttcattacacaaattaaagggaaatgacaatcccgacagcgaacattttctataatgtttgcgttagccatgcgtataaccgcccatttcgctatcttgtgcttgatggatatcaagataccacatattgattttgcttttcagttcgcccatttctttatcaagcccactgtcaacaagacagagaatgtcaaccaccgttttacgctgggtgatgttgattttgttcgctttcatcgcttgcgccaatgcattacaggttttaaccagtgcggcgcgttgtcctttgattacggcgatccgtttgttcgctttcttaatctgccgccctgctttgataggatccatcatgattaattcaccttacgaggatcgaaatgaacgacaatgatcgggtaatcaccagtcacctcattaataatgcgcttaatgagttcccagtcgcccccagcgagtccagcaccgattaaaggtgtgatgataggctttccagtcttaacggcgtcagcaagccctacagcctgtttaaacgcattgccgattgcgtcataatcgacacgcggcccaggtgtccagaaatcatattgagtatatgcattgaaaacaatgttgcctttttcgccaatgtaaacagaacaagttccgagcttatcacgggaaccttttaacgtgttggcatcaacttgaaatgcaccaggaatacgatcgcggatttcgcgagcaataccagcacccatattgcaataacagttgcatccgtggatcaaatggccttcaccattcagatacatattcacagcattacctttcacttctttaatgatcatttttattattcctatataattcgcgttcgattagcatatcgatgaaatcagtaatatcatcaaaccaatccttagtttcttgagcatgagccaaatcaccatcatctaaaaacttttcgcgagcatcagcaaaattatctagtttgttatagagttttgctttgtctatatcattcataaattaaccttaattattaaaagaacgtaagaaaaatacgtaatgtcacacctgtttacctttccgttcacggcggcgatcttcttgatgacacatatataaaacaccaccaaaaattataaaaccgataacaacgcctataaagtatccagcactaaacatagtcatcatccccgcaatagtaacaaggcccagtactctcatgtttaccagcattgtacgccaagaacaccacaaccgccgccataataataaaaatccagatagccattagtaaagccctataccagcattgaattcatcaaccaaataagtgcggaacttttcacaccgttccttatttggcgcttgtttgcatagattcatcattggttcagactgcaaaaactctttttgtttcagcaacttaccgcgtttatacaggtgagcattttcctctccccacatataagcaacatctaactgttctgcgatcacttgcttacatactgcgacatctttgatatcacgattgttgcataactcatccaggcgagcatcacccgcgtgagcaaatccagcaaccagagttaaaagcagtgctaactttttcatgatgattccttattcatcctcttcgataggggtataataatgcgcattgcagatatacgcaagaacttttttcagagacatatcagagaatgtcggatcctgatttcgtctcatcccactaccagtttcaacagcccaacgtttgttagctggattgtatgtcagccagtagcaatcccattcagacagagtatgttcgaacagatcgaaacgcttacgcccatttgcttgcggccttacaaaaggttcaaccatttctaaagcggttaacactcgattaatgttcgaaccgtcttcatccatcgcaatccgcaaacagtattggttaatgtccggatccataccatcgatacccaggccgatagattcgaaaaattttgtcgccgcgtgataagacacactagaagaacgatattccaacatcacagggatcttttccccgtccttgacgttgttaatgatatcctgatcgataagttcaatcaggtctcttttctccttgatcaaggtagaaatttcttcttgcagcggggctatcttcgcatgaagttcttttatccgttgatcaattacggacacttcgaaagctaaatttctcattgcacccattccccgtttttgtcgatgtacatgatccaatcagcaaccgcccaatgggaagtattgcctttcggagtcgctacgatgtaggaaccagctttaaacagtacgcgtttagtttcgttcaggatcaggtcgctcataatgtattcctctcaattagatgcatccataataaaaaagcccccgaccgaagtcaagggctttttgtcaaatgatttgtttttcttctaacagcttcgcggttgtattaaccatacgagcataatcacgggcttctttctttgtatacttgaaaccagcgttatagctcgccagcgcctttttcaagtcgcctttgtggtaatcaagccagtactctagttcatagatcgcatactttgatccaccttgaagagtttcgagctttttgattactacgcgtttaggatatgacttatccattcgtgcgctggcgctccttgcggtaacttgccagcatccataagcgtgatggccctttttacctttaccgacattctcacatgcgcgagactcgatccaggcaatagccgctaaatgatagcctaaacgtttagccttatctttttctacaggttttgcagtcttcaaatcatagttgtgtccaactcgataagcatactccagaacctctttctgcttcggtgtgatgttatccaaatccttgatgtaggatggagaatttttgtttgccggaggcttcacagtagccttttgtaaaggcaattgatgagtaggcaaatccgcaatgaaatcccctagcggatccgttgcagcgttgccagaaaaagagcacaagaaaatgctggcagcaattataattttcttcattttaatacctatgttgcaaaaagaggggcaataatacaccccactttatatttatgcaactattttagatagtttttgcgtcacgtagtttatcggcgataaactcagcaatgttataatttgaaatagccttgttaggatcgtatagtgcaatgatttcatctaacgataccataacggcatgtttaaagtagacgctccagctagtagtaaggatctcgctgttgtcaaatccacaatcagggctgaacaaagcgcggtatttgtatccactgtatttcgtcagacgattcgtgctgtgcgcgtcactggtgatcagaaaagttccctggtgagtttccacaacgaaaaagtatccgaggcgttctttgttgtccagcatcttttcaaacttgcgatcggtttcttcgcgaacaatacgagaagtcagcatttccaacactttatcgtattcgggccaatcattctcgatcacgatcgcatcaaatggtttcttaccattaatcccgcgcccgatttcgattttcgtgcaaatttcgttgaacgttttcaaatcttctggcgtcagttctttaagatcgctcaattttgctacataataacgtttttctagtttcattttacggaaacctcaattcaaaaataatttcacagagttaccacatttaggacatgtgataaattttttcacaacataatcagcagcagagaaaaatccattgtaaatcgcttctctcttttgctgtatatcagatagttcatattctaacccacttttacagcaactgcaaacagtaattagttttgggttatggatgacagtaatcatatacacctcacaaaagggggctttcgcccccatcattagaaattgtcttcgacaaacgccgcgagacgggaacgatacactgtatcaagaatgatatggcttgagtgttcgtattctttcagcttttcaacagcccatacaaacccgttgtttacggcagtgtttcgagggttgtcgatctgcttaatgttcccgcatagtatcagaagtgtgttctctccgcaacgagaaatgatagatttaatttcgtggttgctaaggttttgacattcatcaacaatcagcacagaacctttgcccggatccggatgtccgatactgcgaccacggaagtaatacaggctagggaattgaaccacccctttttcaatcaaaccttcaatgtatttttcagattccggattatccttaaacagaatattcaggctagtaatacaaggttcaatagaaggccggagtttttcgcccaatgtaccaggaaggaagccgatttcacttgataacgggctatctgacttcacatacatcaagttagcgtaatgtccactattaaccaggtgcatagcaccggaaacagcaagcattgttttaccagaaccagcgccgcccataatggtagcaacatcgatttcattgctcataattgattcaacgaaagccgcttgcagagaatcacggggttggatagctttcatgagtttgcgtttcatagcctgttcatgcttaacaggtaagacattcaagcaaatctcatcagcagtcaccacacgcccgactaactcaccgtttgaggtaatgtactggttaggataaaaatcttcgtcaggaagcgaactgtaagtgatttgggctacattatccgtatatcccaacacttctacggtatcccagaaatcagggatctctacataaccggaatacaatacatcgctatcttttaacgtatcgtcgccagtatactgttctaccttacacccacgggacattgcgatcagcaacatcataatatcgcgagtaactaaggttgcatcctgttgcatacaagtttcaatgattcgttcgtcttgcttgtcaagagcaaacgttttgtttccgacataatcaaccactttaagggtgatagtgtcagacagtgctgggtttgtcaggtttaaaggaatacctgatttcgtaatcgcatcatatgactgaccgaaaataacttttgacagaagccggatcgccaatcgtgcttcgtgcgctgttcgttctttcgttttcaggtgatctaattcacccatagtagcagaggtaataatgatttctgtaccaggttgagtgaatgaatagattgaataggggttactaatcaaaacattggtgtctaatacgtattttgacatacattaaccttatgtggtttcgttaaaaaatgcaccgaaaacctcttttgctttccggttataaacggattttgcttcttctggagtgttatagtaccccaaaaattttctttttccatctatgtttatctgcgctttgtacttcccattggctttatgataagaaacacctttcaaccctgtactactgtttgagttacatttctttttcatcgcattttgctggttcgtcgctttctgtaaatttcttgctgtatctccattctcaacaccatatacatgatctacgataggaggaagataaccattctcaacgtaaaacactattcggtgtcgcaaatacatagaacctttaaaatgaatttgggaatactcgtttttgcttccggcttcacttccaggagacatagggccgcgctgaactttctaatacactttacctgtagatgtatcaacatctacaaaattcagaagagattcgatcccttgaatctcttcatgtatggttcttgatgaatagccatgacttttcattacatacccagcgaaattacgtgaatatatgctaatggatgtttcttttgtacacaatgcatgagtgtattatacacaatgtccatgcgttcattgtgtgtgagatcgcactcatcaaaaataaggtttattgcctggtgctctattcgacgtccacggaaatgattaagaattgcccctttactggtcaatacatcacatccggtagcaccatttagccgtttggcttcttctgctgcatttaacttatgcgctacgtaaatgttaagggaactatgggaacgtttcataaaatcaaacgcgcctttagtcttttgtgttcgtctacccagatccagcctggtttcgaataccataaaatcgttagggccgtaattatgcgttggttcttccaactctcgcataagatgcatcttacgacattcttcaattgtctttacataaaattcactattcatgttttacctttaaggggccaaagcccctttgttacgctaattccacatgcggggcatcaatgaattttgtttcgatcggaaggttcggatcatttttccagttgataccaaaacgcagtttaacacccagttcatcacctgcttgtttaacagcattcaggacaggcaaccacactttagggtttgtttgccagccttgaggcaacacgctaggatacagatccaccgcatcacccgtgatgtgttttgagttcattgtttgagatacacccttacggacgttctcgcgctgttgttctacagtacgcagaccttcacgtacaccaaaatcaacaggagacagttgcagagcacgttctacgactttcaccagttgaggtttaacgcctttaaggttgttaaggcttttttgactgaatttaaacataaaatcacctcttgtaaaaataccctgtttgggtacacagggtatttatggtttaagaggttcgataattaataatcgtaaagatcaccgaagcattcttcaaattcacgtttacgttcaatttgctcgtttctacgctctttcatatcaggaggaagacggttttcattgacttcatcaatgtaagcctgtgcatcctcttttgttagaaagaatgcatggaaattgtatccgttgtacccgttcatactacgatcttcaagagagaattctgtgtgacagtcccagtctttgtacagggtaatacatttagcaaacagcccaataccgcgatgaatgtatgggaatccagtaacaatcatcttgctacccatttccgcattttctccgttcacacagaatacttcatacatgatcgcacctggtttaacatctttcttaacagcacgtttttcaaaagcacttttcataatatattcctctcaattggtgtaactacagactactagtttattttctgaatgtcaacaaggtttatcgttttttgacggaaaagttagagtgaacaaacgatcatgaaggttgtcgatccgttcacaagcctgtttcagtatggttttatcaccatcatttgttgtttcaatgcatccaagttcatcggcgtcaatgttcactacgtcgctcatcaatgaagcaaacacgttagcatcaggatgtaacagttcttcgatttcggccttcatgccgtcgtgttcagaaaggatatcaataatatcacgggttaaatctccctggtacgggaaccctgtttctaaatgattgatgatcctttgtgctttcgtaatcataattttacctacaaaaaagcccctttcggggctagttaattaaagttcacagcaacggcacacaccgtattttgtaaatggagcatcaccgctaacgtaggcccagaaatcacatgcttcttcggcagtatcgaagattgcggcatcatagaacccgtgggcttcgttaccgttctcatcgatgaaaaccggagtccagatattaggattgaagcaatcgtcaacaacaacccaaccttctttagctttcattgcttctttgttggcttcgatgtgagctaagatttcgttcatgatgtccatttttctctcctaaagtgtgtttcgtttcgacagggctatagtctcataaccccgtatctacgtcaacacttatttgaagcgaattgtgctatttttgaaaaatagtccagagcacacagcaccttcaattttcacccctgtagggcttttagcaacgaaccctgttgcgtaggtgtctttctcatcacatgcgaaccaggcgtggcctgtgtacgtgatatcgctaaacccgttagcagtcagaatacgttcggcttctttctcatcggtgcatccggattgtgctaaaacgacaataacgacaataacgactaacaccaaagcaataatatatttcatgttaaactctttttaagttggttttactggcttcaatccagtacacgggatcagaatagttaccgcacatacccagtaacacagttgtacatcctaaatgatcggaaggtctcaatccatcaggatgaaaaggcaattcgttaacaccgatactggtagcaaaaagagcacctccagtactgtaaaatgttttgatatgatcgtatgcatcatcaggccactgaaaacgataagttttattgtcaatggttactgtatacatatcatattccgtaaacaacggatcttttccttgtgttgcaccatacagagcaccgcgccattcaaccagatttgcttcaatgtcgcttacacaaatttcgttacccatacgcaaatcatgaaggatctcttcaatggtacgaatagccccgctaagttcattagttaacatagagtttcctttaaattggtttaatggttttcaggtgtagtttagcataagaagaaccaaatgagttgccattatgatcaaacttatgttcttcactcttccagtatttccctgatttcatcaagggtatacgcttcttacctgctgttatcgtttcaaccattccggtatgagtgaatatcatgatataccctcttctttcagcacttcccagatcaggcgatccaggtgcatcagattccacataacggagtcatacgaacccagcgagcgggagtaaatcactccccatgaacgataagccttttggaatgattcagcactattttcatcgtgcggcatatcgtcaccagaagcgatcaacagtttcagaaccatcaggctattgagcgcctttggcgtgaattcttgttcgcttaacttcatcgcgtagcgttcgatgatcgcgattgacttcggatctttaatacgcccatctgtacggcgcgttttaaacgcgctcattaattcatcgactacggcggtacacttcatatgcttcatccttttcctgtacagacatccgattatagcggatctcttcgcgctgttcaacttctctcactgcttcggctttcttttcagcggtgagtatgtgatgtactacagcgtttcggatttcccagagatattcaatcatctgcatatcttcaacggtgtggtagcctttcatatcacattcaaatacaatttcatcgcgttctgccattgccacctgtgcggtagaaggacaaataaccattccagagtatttttcaatcaacgattccagtgtacgcggttttgctggaatgtcaatagataccggaaccattcgcatcgttgaatcattatgggattggtaaatcatcagaatgtgatctccgcaaactgcattctacgctcaatcgcatggatagcgttatcacgctgttctttgttttcatatccagcccaggtaatcggggttgaacagatcaggtgaaaagtgattgctgggtgtctcttcccttcaacaacgattgttgcatcatcttcgatccaggttacgtgatccagattcaccggatagtttcttacggtagctgtttcgccaaccaaaggcgacacgtccagaatatcacgatcgcggacatatgatttaatacgagatacgattaacattatttcaactccactgcatatacatcggtttcaggggctttgtgtacgcgcatatctttaccacataccgcataagccggacagttacggcaaccgttatgatccttgttgcccgtcagttctttacggaactgttttgttttcgggtgttcccagatatccttcacaaaatcttcggcttccagaacatccagaccttcttcccagccaccttcaacccagcgttcggtaaacgagcaagggaagaactgaccacgttcgttgatgtaagagctaaacatcgtcgcttcacagtcttcggcgtattgcttgtactgttcgaagttcgggtgtccctccatcgcttcaacgaaagcgggggctgaacagctatcgaatccaaatcctacaccagaatcgaggcaatattcaacaagttttttatactgttcgcgggtaacggtgtcccagttcttaccgcgtcccttttgtttcagacccaggaatacgatcgcgttaacttgtttcaagcgcggatcattctttacagcatcaaccacgttaaacgcgtcatcataggttttagagctaaccatgaaatgaaggttgatttgctgttgtccggcttctgcaagattagccactgaattaaacgctacatcgaatccagcatgtttgtatactgataccgcaacagccccagcaacagccgctaaacgcgctgcaacgtcttttgatacatcagcaatggtaaggtttggtacaatgcctttagaacgcgcataggccatcatatcaaacatatcagggtttgtttgtccctgtgcatcagcaccgagggcgcattgtgttaaccagggcattttatcaatgatagatttgaatgtatcaagatccatattgaaaccgttagggttattagacttgtagcagaaaccgcaaagtttaccagcagggccattgcatttagttgtgatctcgatatcgagaatttcggggaatggtgcgtattctggatcgtgggaatatgttgcaccccagcgagcgaattcacctgtatcaacgttgaaattatagttgtagaacttcgagcgagcgaagcgcatattaccgtgttgatatatgaacagggacggcgctttgatgctggtaacgatatcgacagatttcataatataattctcaaaatttaacgtgggattggaagacagcgcgagcaaggctttcattgtcgaacggtatcgactggtgttgcgctttgctgtcaatgttaacgcgccagaactcactagaaccgtttttcgtggagtaatgcatcagcgttaccgttttattcttttccaggaaggtgcgtttgtcaatctctgttttgatttcgtgttgcatcattttacactccgtttcagtttacgttcgtcagccagttcttttttgtacagtttaatgtacttcccgttaagggtgcgaagctgttggaaaaccttgttgcacaaagcacgtttcgctttgtattccggcgtattacggattgattcgaccgtcatacccatttcgtttttagggtacgcgctcaactccctgccgatctctctgtgccagttgcttaactgatcacgctgtgctttgtactcttcaaaagttaacataacaatctccggtttcgtttctatgtgtgtaaggtatcattaccctacacacaacgcaagcgattttattttccgtaaagaacacaatattctttatatttttcacgggctttttcttcattactaaaggaaactcccgttccaaaatcagaaccttcgaacgtaacatcccacgattcatacccatcttccgaataataggaaagtgttattttacgatcttcaagaacaagttgttcaacaacaatatcaatttcagtagtcatagttcatttccataatcttttgctgcatcttcgggggttgcattcagtctgtaaagctcaacagctaacggactgggttttatttcgcggttcaggatctcactgataccgcgaaggaattctatataaggacggaatctcatttgatacgtaccgcgttaaaagcctggttgcgcagttcataagcctgttcaagctgttcagtagtgaacagaggactatcagtgttagtggtgaaactgcaaatggttttgttgtcggcgttgacttcttcgacaacgatttcataaccccagatcccgctatactcacatttcacgttccggtacttgatgtaaaccgcagcaacatcttcttttttgtagttccggcttttgtagatgatttccatgatttcctccttcgtttcgatgtgtgtacaataacagatcagggttatcgagttttagcaatttgtgctaattatgccattttcttagcgattttccaggaggctttgaacgccggaacgtcttcaatatcaatccagaaaccagatccgaaaccatcactatagcaagggcaaccgtcgcagtagttttcccaggtcatcacttcaccaccaacagaagcaccagtttccatagcacgtaatgcatcttcaactttttccaggttttcggcgttgtcgtcgtaaatgacaaagtaccatttaccgttgtattcgttacccagtttgattgattcgcgaacaagtttcatgatgatttcctttttgtctgtttcgtttctatgtgtgtaatataacaaaaaccctcaccataggcaaggggtttttttgcaaaaattatcgtttgattggggtattatctataacccgttgaatttccgaacgtatcgtagaatactgacacaattcggtaagcgcccgatcccatctacctgactatatttctggaatatgtaaggatctgcacctcgatagccagttgcttgatgcttacactctcgtttgaaccatgacattaataatatccttgtacgttgaagcgatcacataacaattttcttgtttggttagtatcgctttggatagaatgcaacatagcgctgatcatgtttaggttattttgcatcatttccgcgctcatgagaacttccatacgcgcacgtaagcgtttattttcttcttccaactcaaccatacggtcatatgctttgatgcgctctaagggcatatcaggacgctctttgagtacgcgagcacgttcaacctcacaagcatgatttgctttccagtggttcgattccgcttcaaatttattaaggcggcggatctcttcaaccagctttttgatcatgtgtggatccatcatgtcgatgaatttcatcaagcaattggattttgtttggttgtcagcaacagaccaagacgaattatacgtaaccgtaaacgtgcggcccatttcatcaacaaccccgatcttgttatcatcggtgattgtagccgcccatttatcccgcatggctgtacaggttccactggcgacactatgcaacttgtttaatgttgcgtcatcaaacacaatttcatcactcatgtatgcctcacatagatttcaaaatacgcagaagtgcgttagtaaagatatcaggaacacaaccaccaaacaacttatgattcatcagcgctaatttcatgctgtgattttcagtatatcgcccgttatggatcccccaggcaacgacattaccaggttcatgaataactaagttagtgagagtaacggtcatgcgctctttatcattgatagagaatgaatagcagtaaccggatccgatgtcgccgtaaaggttaaggtctttcaatttcccttgctcatgcaagcgtttcatatgaactgcacatgcatgattaatagtcatttcgtcatccctagcccagtcatcaataccagaggtataacgaatattgaaatagttagtcagttcatttgatacgctcattagaaacctcacttttataaaattctttaccagacccattacagctactgcatttgggggaacggttgctatcataccgccccgatccgttacatgcaacacatttccttaatttccagccatacacgaaccgcatataataatcagttcgtgcggccttgcgttcgtggaaattcatgctttgtaaacctgaaccaaccacatttcgatgttaggcgcgtaagtaacgtttaccttatgcatagtgcggtatttgtaagcggctttgtatgcatcgagttcagtcggaacacagaaagagaaaccgttgtcatagcgttctgcgttagaaacttcacaaccaactacagcggcaatatttttgttcatgttcatggtgttttcctttctctgtttcgtttcgatgtgtgtaatataacaaagcccctgcacgaatgcaagggctttttgattattttggtagtttttcgatggttgcttttaactcattgattttattaaagagttcatcgctatatttcatcaactcactacggcgcttttcggcccacttgaccaggaattcaggagaatctacaccatacgtgtaaccttctgcactcagttgaatacgagcacgggaaccataatcaacagaactttgttcaatgagaaacttaaccgcatcaagcagggctaaatcttcatgacttaccaatattccttctgcctttggaagatccacaacttcatcctggatgagttcacggcgggttgtttcttccagtgtttcatgattctggatcatcgtttcgaccggatcctttgccacgactggtttgttttcacctacttcttccaaaaacatcaacatccatccaggaattttagtccggaaagaactttgcacttcactggtgcatgaatttcccagaatgtggatcgcgttgccatgcatatcaactttattgatatagataacgttctgctgttcctgtcggttgctaccataagaaaggaagcggcgtaacgatgtgttatgaccgtacttccctaaatcaattcagccaggcaatcaatgatcccacggttagaaaccttgtagcgcttaccctgtttgaaaaataacggttcttccaggtgagtaggggtaaactcttcataaagaacatagaattctttaggaattttgcgctgaaccagactcagtttacaattattagaaggaacgataacagagtgaatgtttccttctgtatcacacatagcttgcattacttgcggatagtaaagatggttcttgcaagtatagctatggatacgactctgacgttttttgaagtaccatttaccagtttcaaaaggcgctgttgtaaaattcattttgcattctcatacatagttaaaattgcttgcatatgttccggtgattgtggaacccctgcaaagttcactttcaaaaagaaattcaaccgatcttttatgttgcactcatcgagtccaagcgctggcaatgaaatgttttcaaaagcacgttgttcatgtctttccatttcaccccaaaacaaacgggaaccgttaggcatcggtattccaatttcattgttccagaatttcatgatagttgtcaagcgttgttttccatcaatgacttctacccatcgagattcgttgaattcactatcaaccgcgatcgcaatgataccgcaaggaaacccagtaatcaaagtcttcatgaaagcatcttgctctttctgcttccacacgtagggccgttgataggacggattcagatccagatcgttgttcttgaaccagtgaatgtaactaccaaccatgatcgcatgatcgcgactttggaaagtttttaactcacgaatacggtttcttacaatttcgtctgtcattataaaatcaccatccagtatataatcgtaatcataaccgctacagtgaaacacattgcagcatacacacgcgcattatgaacctgtgttttcaattctgcgatctcttgatccttttcgctttcaaactcttcgcgagtaccataatacccaggatcgttagccgttgccaatctaaccgcatctttttcaaccagcgttgcgtaaccgctttttatttgtgtcgccccgtaccatccaccccgatcgttgttaatgatcagatgatcacctttttcgttatgctttgattcgccaacaacaataacccgcttaccattcataatatgatcctcaaaggggccgaagcccctatttcgcgttcttctgtagataatctaacagatttccgctttgatgtaaatccaaaactttagaaaacttctctgcgtttctttcgtttgtaagttcgtcgaaatgccatacaccatcatcagctattaacgcgccaggtgatgaacctgtttctacatcacgggaaagcgcaagccccagagggtgtaagatttcgcggttaatgcgccaaacaaggcccatttcagatagagtattaaaatcgacgtatttcatattatgcctttggtttcacaccgtaggccaacataccgaaacggtgatcattatctgcatctttaaacagaacttcgttaccatcaatgcagatgacctttgcttccggatcgatgtatggaagcaaccacaaagggatcaggcgtaggccgctatgttcatcccaacgactgaaattgagttcttccagttcatcaagggaaagctcattaggatcgatataacggaaccatttggtatttttgaggcggtcggggaagtttacaatttcttcatagccgaattcagcactccatgaagagtaaacagtgacttcggatgctttggttaaaacagcatcgcgaattgatttgcagatatcgattaaagtcagttgattttccatgatatatttctcatcttgctaaaattttaggcagtagttgccccatcgttttacgtgcatgtgacggaatctgtgagatcgggacatatttaaaatcatccatttcacgtatagtccgtccgttcttaacgaaagttgatgcacaatagcattcttccgctactgggtaatcttgccctacatagaggaataaagcaaggttttttgttttcgtgtaatcgagaacacccaggctaaccaattcctccgcgaacacttcaaatcctgtttcttcgaagcattcgcggatcgccgcgtcaatatgagtttcgcccttttcaacatgccccttcggaatatcccaatggggcgtttcggtggcatggcccatcaacacggcaccatctttaacaaagataatacccgctgatagttccatttattcacccgcaaaagcgttatcaaatgcttcaagtgcgttgttagcgcgagcactggcttttgtcacaccagcctggagattttcaaagaaggtatgtttccacacttcgcggcgactggattcatgttccagactgtttttgtgatcaccgcgaatctgttcttccatgtcataacggtacagatcgagttctgcgtttaatttctgttctaatgtctgtgcaaatacatgttcaatattcattttgtatagcctatttcagatttaaggttttcgagggtggagtgataaacaacattcccttcgtgtcgagtataccatacttttccgttctggttacactcattcattactttttcatctaaaccagggatcggcttcatgctgggagaaaacgcgatagacatcatttgttctgcactatcagcaaaccaacaagggaaaacagatccagttggtttatcaagatacatcaactctactttagccatagatttcttcgaaatcctcacaatcaggcaaatacgtttcacagaaggtgcaaagcgtaaagaatgcaggttgacgaataccaggattatccggtagatacatccagaaggtgttagcaaacacgatgaatgttttcaggttttcaacggttacttcgctgataccatcataaccggattgagcaatagcgcgttccaggggaacagggtattgctggcaatagtcggcgtaatgttcactcaataccattgagttagccgcttttacgagatcgataattttcattcgatataaccccaacgaatttgtacgttatcgatcgatgcctggcttgtaggagttggatacggataactttgtgcttcccacagataaacaacagcgtgttttgtcaattcttcgataacttcatcgaaagtcccgacacaggtttgtaaaggcaacgcgaaaggtttatcactggtttcgacttgagcaatcggcccatctaccaggatgacgcgaaccgttgtatgctcaatcatatgagcgtatattttgtttttcatgattttacatattccactttaacaggtttggcgataaggtgatcttttgtgaagccttgtccgtcgcaaacatcacaaacgattttgaaatcttccatttggtcgacccatccagaatcaggcaatccagaagggtacgtgttgaaggttttaacactgtatcctttcccatcacacttagggcatttatatgggtatttcgatttgatcgcactatacaattgacccagtgtggtcgaatgatcaaagtgtataacaaatgcttcaatgtcagcaatacgcagttcgtttggcttgatcacagtaaacacatttgaaggtatgtttgagcgcataatatatttctcacttaaagaattttttgatgaaagagaggaacaggccaccgctaaacatgatccagtatccagcaccgtcgccatgaaacaggacgtaaaccgcaacaccgtagcaaaagagttctgcaatgttcagtaagtttctcataatcccctcccttttctctataccaggtattttaccagaatatagaccatagtcaacaacaaagttttatcaacgatacgatcaccagtcatcagtagtcacccataggttgagaagaagcaacgctcaatacgcggaaagtgcaattgttccattcacaataagtttttgcgcaatgaacacttcctttcataacaaacccgtttgagaaaattaaccagtaaagtttcatgatagcctcctttgtttcgacaaggccaatataacaaagcccctgcacgaatgcaagggcttttttcagtttttcaacatccaaagttgcggaggacaatctttagaagcgattagacgatccaggcgggacataacccgacgataaccgtcgtattcaaaattaatttttggtggaacgtagttgacctggattgtttttctgttagctaaagaaacatactcagggatcaccgttcgcaaccgtatagcgatcactggcttctcttcgccttcgttaaagaacatttgaacagttataggacaagcaaagattttaccatttacccgacgataaacaataacttcctgtgtcccttctgttttggccttcaccgcgtaggttagaacataacacgaataatgatttgctagactcatcatgatatcgcgataagtttcaatatcttttttaatcgatactgaacggtctttaaagcgatctgcaatgtggtcagcagtagccgctaccttgattgtataccagtcacctaacgcgctagtaaacgcctcgctaacttcttttcgtacactgttaacaagatacattaaacgtgttctgttcatataatcctcactgatttttgaagtattcgatctgacgcaaacgcttttcagcggcggctttcgaatcgtattcaccaagttcttttgtgcgatcgtgattcaaaacaacccacttatcgccacgctgttcaatgtgttctgtaatatcttttaacgacttatccagatccagtgattcagcctcttcacagataatagtcaaatccacgggcagtgtcaacaaccttttcactccgctgatatcatcaagcatcgaatcgtatgcaagggttacgtgcggtttgtaatccggataatcgtatgttgcgccagcatcaatagaatctttgaaacggctatgcaggtattcagattccaggatccctacgatagtgctaccgtattttgtgtcccacttttcaacatcaaccagtttagcaggttctgtgatgtcctgttgcgggaacaaatcaaccgttttccggctgtatacgatcgttgtatgcatcttttcggctgaaacagcattctttgtgatacctaatgtcttttgaacatttttcaaagcctcacatgaagcctgatcgaatttagcacacatgtagataccaggatctacaacaggttttgtgatttcaagaaatgatttcataaaacaccccaataaaaaaggggccgaagcccctttgtaataaatttgtttttacgcttcttcgccaaaggcggcttcatcttccgcgcctttttcgacttcaacggaagggatcagagcggataccgcgccaatcactgcttctggggttactggctggcttgcgtcaatacccagtaccgaacacaggtcggacagaagttgacgatgaaccgacagttcactttctttttgcgcgataacttcgttaagatcgaatgcgcggcctttcagtaccagtacttcattttgcagtttttgaatatcagacattttattacccattgttaaaatttaaaagtatcgagcactttgctctttagttgtttcaaagtaccttcgttagtgatgatactatctccaggttgaggtgtcaaacctttttccgtggaatgttcatcaacaattccggtatcctttacaataaacacaaacttagcacccaagcgtttcaggtatttatattcgtgttcctgacgacagtcagttaccagaagatgattgtattcgtcaccagcatatttattgacgaatctttccagtgtgtaacgaacccaaaccgtgttatcatacttgcatacgatatcagttccaaacacttgcatcaagcgtctgatactccagggagtatcgttactcataatcagattatcaatatcatcaggactataaacaatattgtatccacgttctttgaggatttcaagcccgattttgaaaatatttagaacatcttcattagacatcacaagaggtttctctcgatcaccttcgtaaaaaatagcatccggatcagaatattttccttcaaccagactacgaatgtatggtttagcgtaaccatatcgctgcattgctactcttagcgttcttttgataccaaatgccagtgcttcacactgaacatcattgtacgcctcttgaataaatttagcaaccgtatctttaccagttcgcttttttccactaatcacataaatcattagctcattctcttttgagaagtgactacttttccgtcaatttcaacttccatatgaaggaagccaaaagttgccatacacgtaaccgcttcatcactatcgttagtataacccaattcaacctcacccaagtttgttgggaaggcaccataaaatctaaatgtggcgatcgttttcatctgggagttatccaggatatgcacagcgaatgattgcttaggatcatcccacgcaacagagttaaactcgttgtaatcgtttgtgctcaacatccatatgtaaatcccaagatacgatctcatttcctcatcgactacaaagcggatcatcaaaggatcaaactcaaaagccgaaccaggtactttacctcgaaccatcatatttgcaggaatatcaactgctgggaggttcattgatggtagtgtaaccccttgaacttgtaaagtcaaacctttcatgtaactgttatcaggaatatcaacccgaaagtttgtaggtgagatttggtttaaaatcatttctgtagacataggatctcctttcctctatttagcggggaacgggatcaaagcggcctgacggggtaatataaaaatttgaagaaaatgcttgaccttttaaaatctttgatctataataattattaattaaaattttatcaaaaagatctaacaagatcaagtaaagtttaataaataatttatcaaaaatttttagatctgatcttgaattcataaattttatgatctataatatattaatattttattttatcataaatttttatgaagatcaatacttagatctaataaattttatgctttttctgaaaacttttcctttaccccgtcactaaatactggtactatgttcccatattggaaatcaggaaaaacaaaatgactcacttgaaaaaattcaaagaatttctgaccgaaggtaaaaccctcgctcgtaccgtagcacgtggtcaacgcgctaaaacttccgataaacattcaatcggttttcttcacttcaaacatggttctgatttcgaagttttagcaccggattctcacgatctggcatacttcggtaaaaacattgtacgtttgaaaggtatgactactggtaaagttcaagcggcttatgtcgattgggctaaaggtactgtttctttctacagtggcaatccggatgatgatctggatttcgacaaaccagaaaaattcaaagctgctactctgtatgaagaggcggaagaaaatctggatctgtataaccagttagcagaagatttcgaaatcgagatccctatggatgaagctctggtgaaaggtaaagtttacaaactcccaagcaacgatatgcgtcttctgtacactgggcgttctaaaactaaagcaagcggtgaatatgcagtgtttaccgtagttgatgcttccggcaaacctcgcctagtatctggtaaaaaattcacccaggaatataaaggcgatatggtttctaaactagtcctggctgaatccgaagatctgaatgaagcggctaaaggcattcgcgaaaaagttattgctgtgatggtgaaacgcgggtttaacgaaaaagatgcagaaaagatggttgacaaaaacctgaaagatgctatgaaagttagacctggtgcgacccctggcaaacttgcagaaatagttagcaccctgtaaaaataaagccccttcctttcggttggggctttttgattagtatttgctccagacttttttcgcgccgtaaggtttccctttggacataaattgctgagtcggtagccaaacagctttcgcccaatctttaggggcaatctctgctaatggtgatttgaggtgtgatggtagatatgctttgatcatttctgttgcgcctcgcatacctttcacgttaccccagttaattttaagcactgtcttgttagagaggcgtttagtggatccgtaccctcgcttcaataactcttctaaaaactcctgtcgtgctctgggtggcgcatagtgcaagttcaaaccatagaacactaagttacccgctttcgatcttccggatcctaagaaaatgatcagtggaaatctatcccaatacggcagggtgtctttatattttgcatcatatgcaaacgtgtacaggcgacccgttgctggttttgccacacggtgtgttttgatactggttttgatgaaattaccaaaccattctgttgaatctttctgtcgctttgccgccgatacaccaacagtgatctttttcagactattacggaaatcgttgatgatctcgattccgtgttttttacggtagtcattacgttttttacgggcttctgtctctgcggaacgtcgttcaatctcatcatcaatctgttttttgtaacgatgcattgactttgtgaacgttgcgtagtttaatccctcagaatcggcaaaacgtttagcagaaacacctttcgtttttgccttacggaatttgatccccagttcaacccaatcactcaatttgcgtttgggtggtgctttgggtttatcctcttccgcgatgatctcaaactcaaaaataaaactcatgtttccctccagggattactgacctcgccacccaaaaacttttttgagtgattcttctgttacgattttgaactgccagcctttttgacggcatagctcatttgcggctttccacttatcaatattaactgtataggtgtaaagagcatcaataaatttctttttattgtgtacgttgttgtttactggcttcggtggaggcatggtttctttaaggggcttaacctcccaaagatatgtagtaccattttccatttccacatagaaatccatgtaatagcgtcttctcttaccgtctgcattgcagaaatacgggatcactatacattcagaattccaacgttttacgtgtgggtttttatccagccacttcataacgtagcgctcccacgatgacctatacgtaatctttcgcggatcgcctttatacttctgtatgttttcgggtacaaacgaccctttatacgtctgtcttccagccattgcgtaaatcctaaatagaataatataacgtttagataggggaacttatcgtgctattttcatacttcccgcctgttgattacaaaggcacccagacaactgatattttccgagactatcgattttattttaatcgtgtgattggaaaatataaaacccgtagttaccagataacaggcacactacgacctgaacaacttgcagaatcattatatggaaaccagcaatactactggatcctgttgatgcttaactctgtttatgaccctttctatggttggatctccgatcaggaagccgcgtatcagtgcgctatacagcgttattctgaggttggcggtgaacaggttctgtatcatgtagatgaaaacaacaacaagtattataaccttgtcgaagaccccaataaccctggtcattggtatgacaaaggtgacaaaccaatgctgtatttacagtatcaaggtgtattagctcctgtagatatttatgaagatgcagtgttgcaaaatgaagcaaaacgaacaataaaaatcattagtccgtctgacatccaggcgtttctgaatgattttattaaagaaatggaaaaggctaactcatgaaattaggcggaaatttacactcccctttctttgatggggtggttgaaaacgttgatgatccgcgcgggttgggccgtgttcaagtccgtgtatttggacaacacccagcccaaaaacaaaaatccgatgcaatcggtgttcctgttgaagatttaccctggatgatgcctattcaggatattagaagcgctgcgatctctggtgtgggcttctctccaactggtatcactcgcggatcctttgttgttggttattggcgtgacaaatggcaccaagatggtatgataattggtactgtcgctggtgaatatgtcgaacaaccagacacacagaaaggtttttgcgatcctatgggtgaataccctcgctatgttggtaacgatgttaactcccttgcattaggtggtttgaaaggcaaaggatcatcaagtgtcatcattcgtgattcaaacacaagcatagcagtaaacccagacgatcgcccactggatgagataccagaagataaccgccctgatacgggtggatttacgatcgaaaagatgctcaagcaggatgaggggatccgtacacgatggtatacagacagtgaaggatatccgacaattgggatcgggcatttgcttatccgcgaaaagactcgcgacactgcaaaaattaacgctgcgatcagtaaagcggtaggtcgagaagtaacaaacgggacaatcacggcagaagaggtttcaaccttatttgctcaagatttagccaaagtaagatctgatattcagagaaccgctaacgtccgtgaagtgtatgtgaacctaaaccgtcctcgtcaaatggcgatcgaaaacatgtcgtttcaaatgggcgtcggtggtgttgctaaattcaccaataccctaaaagcgatgaaaaatgaagattggcaagcggcttataatggtcttcgcaattcactgtgggctagtcaaactccaggccgttcttctcgcgtgtctaaaatcgtcctcacgggcaaccttgaatcatatggggtgcaagtaccagatccggaagggcgctctctgagtgctgcttacgctgcgtataacggtgctacattgtcggctactagtccggaagatccgtttactcctggtgatacccgtgtgatgtttgaagaaccagcatcatcttataatgcggaatatccgtataacatggtgtttgaatcgagatccggacacattcaggaattcgatgataccccaggatacgaacgatataaccgtgttcacccagcagggagttacgaagaaattcgcccggatggaacccgcgttgttaaaatcgtaggggatgattatcaaattgtgatgcagggccggaaactcaatgttaaaggcaacttgcaggtagttattgaaggcgacgcattcatttacaacatgggtaacgttcaacaaacggttgatggtaacgtaactgagtttgttcgtggcaacgttcaacaaactgttgaaggtgagtacgttggcctgattaaaggtaacgctgaactaactgtaaacaaagatgcaacagttaacgttgatcagaatcttaccgcaaatgtgaaacagaatgcaaccgtagctgtaacagaagacgcaacgatcactgcaaaaaatgcgaaaatggagattgaagaaacgatggatatcggtgctaaagatatcaatatcaaagcaacgaataacacgtttattgattctggcgcattaacaaaaatcactggcggcaccgtccaagtggggtaattaaatgattatggattatgaatcaataattgatggaattatgcaaaattatcagcatccttgtgatgctgagatccccgctggctattatcggcgggttatctggcaagggcatacagaaaattatccggctgttggggttgagtgggataccgagataatcaaaatcggtactcatctttatactcaagaaccattcggacatagaagcacggatctacctgttgtcaattcaccaggaacagatccaaataccggacaatcaacagggatccttgttccaaagattggctattatttcaacactcaagcagaaattgatgcttacattacatctattggtgcaactaaaatcaatggtggtaatgattggtatggcgcggatctgtcaaaatcaaacctatacaaaaaccctggcgaactggctatgtataaggttgaaaacagtggcgggtatctttccggaacaaaccctgtatgtgatgctcgcatacgtcaggcatataatcaggacactggcgcattcaccaatattgattattattggaatggtaatcgtatagcctatatgaagcatgacgaaacaggggcgcaccagtgcaaatatacgggtatgcaggttaacaccaacgcagatacaagcattcctcctgttcctcctgcaatgccttccacttatggggcattaccgagtgaattaagccgtgctgatatttcgtgcattccggcaactgttggtttcgcatatacaaatatcagtgatgctatgttacaggcatggaacgaaacccgtaatacgttcaagctacagtttaacatgttaacgggtgctgtacagaatggattcgggatcgcgacgatgtttgatggtttatccgtatcgatggaagaagtaatggcgggggcgctcgcattgtcacagcaagcatggcaaactgctatgaaagttttcagacaagtgattagcgctgcatttaacattatcggtggtgcgtggggattgattaatcagttcttgcctcaagtaaccatcttaggtgttgcgatcaacatttacgatctggtgtttggtgataattctgttcagactttgaaagatgcatttaatgcaatcatcaaatccggacaacaaacatatgaaaccgtcataaacgcaatatacggggccataggaagcgcatacaattactctgtggaatatgtcaaagctggcgctcgcgaccttgtggatgcgtgtagcgcgttatttgattggtgtttaacgatgttccaaaacggttgcgttgcattaatcgacttatacggtcggatcatgcaaacatgggctatccctccggaagtcccaaacccgttatggtctgcggtgctggctatccgtaacatcatgatgcaaatcaaaccacttgatataattctgggcggtaacttccctggattcactgcaatggatttgtatcaacaagcacaggaaaaagtcaaggcttttgttgatgagtcatacgaacagatccgagggctttatgaacaagggcaggaactttacaaaacgttaaaaaatcagattttcgaacgtgatgcaattcagagaaaattcaaccagtacttaaactggatgtggggcgctgtaacagacgaagcaacagcggcttatcaatctgcattggatgttgcaaacgctgctgtagctgcaacacaggccgcgtatgacgctatacaggaacagattggatctctacaagatgcaatgaaagatacatacagcatggcgatggaagaattaaagaaattgcctttgatgagtacaataaacgagtttttaggcttctgtggtgtcgcatttgacgatcttctcaagtcatatgaaaatgcgattactggtgctcagtctctgtacaaaaatttcattgatagttctcgctcgtttaaagatcactgcaaagtaatctataaccaaatttgtacgttggcgttgagtaaagtcacacaatatgtgaataaattgctgtctctcataggattagcaatcaactttggttcgattagtgtatgtgttccagtactgaaatactaaatagtcgaatgatcaagaggaatttataataatggctactgctaagactaagactgtcaaaaaacagattaaccaaatccccgatatctttatcgggggtactttcgaagaaattaaaacagatctgattgattggctgggtggacaagaagagtttaaggattacgatttttccggctcgcgaatgaacgtactgatcgaccttctgtcgtatgctactctttatattcagcagatgggtaacacggctctatttgaatcgtttattcgcacggctgcgttgcgtagttctgttgtacagtctgctcaagaactgggatatatgccagattcgcgcacggctgcaagcacagcagtaatgattacggctgctaacccactgaccccaacatcgatccgtatcccgcgcggtacaaaattcatcggtactgtaaagaatacagacagttattcttttgttgtatcggatgacgttgttatcgttcgtgatagtaataacaactatacatcaatgctgaacctggtgcaaggccgtttagttcgtactgaactaatttatgacggttcaagtatcctgatccgagatccaaacattgaccgtagtcaggtacgtttaactgtaaacggcgcacaatgggaagactggacaaacgaaagcattgtaaacgcaacaggcgcaagcacgatttactacatgcgtgaaactgttgatggacataccgaagtttatttcggtgaaggtgaagcaagtcaacaagtggcgggtggtgcattaaccgctgaatatatcgggggcttgaaacctgctaatggatcgactatcgttattgaatacctgtcaaccgatggggaagcggctaacggtgcaaaagattttatctatgtcgatacattaaccaatattagcatcactaacatcgaagaaaacccgactaaatcccctgattatgtcggtgctgatggtggtggtgatccagaagatatcgagcgtattcgcgaacttgcccctgttatgcgtgaaacacaacggcgttgtgtaactgcatcggattatgaatctttcctgtctcacagatttggttctatcatccaggcggtacagtgctttactgataacgaaaaacctggttatgctttcatttctgttaaaccaaagtcaggtttgcgcctaacatcggtacagaaagaagatatgcaaacgtatctttcgaaatataacctcgcgacgatcaccccgtcgattatggatcctaactatctgtatattgtgcaatctgtcaaagtaacgtatgatatcagtaagttgacggaatcagaggaatggttacgcggtcaggttatttcgtcgatcgactcttactatactgacaacgttgaaattttcaacaaatctttcagtgtatctaagatgttgacttatgtcgatcagtctgatacttctattatcggttcggaagcagatattaaattgctccgtgaaattgacaactattacagcgcccctatgtctgggatccatttcttgaaccaggtggaatctaaatcaatcatttccagtacgttcaagttcaccaacgaagaagacgaaagttatgatgttcgttatgcttctacggaaatggatcaggatggtaacgcaaaaattgtaataggcccgttcaaggatggggatatttcgatcgctgcttatacaggtgatgactttgaaaaattaacagatgcaggaacccgtaataaatattacgaagttggatcggtttctcattacaccgatttcattagctttgacctgggcgttctgaacgtatccgccgatagtttcagcgctgcttatatcgagctaactgcaaaacctctcgaagaaaccatttttactcgcgatggttcgttgatcgtgtttgaaaatgacctgcgtcctcaatataccacattgactatgaatcctatcagtcaataatctttaacccctgtcttcggataggggtttttctttttataaatacgtgatatacataaccgcaaatttggagaaatataatgattaaagcgccttcgattacgagtttgcgcgttgataaactggctgctaacttcgtttaccttaaatgggatgatgttggcatggatttctattatgtggttgaattggcccgtagccgtgatatggacggaactattattccagacgaagagttaatctggacgcagttgggttatagctacgaaaacgaatggtttagcgatcaggttgccccaaatacacgttataaattccgtattcaaacaactcatgaagggtttgaaccttctgattgggtgatcagcgatgaattatggacgtttgatgagaacgcctacgcatatacaaccatgcgtgaattcacccctgctgattcgtttatcaatgaaaaattcgccaaaaacaatcgtgattacgtcgattttaacgatgatgttattatggcttctctgatggttgaggattttgtatactctcccctgtattctgatgtaagccagatcagcgataagatcctgaaacaagaaagctaccatgaaattcaagatcacatcgaacacgtttgtaatgatatagatcgcacgttcctggtatactcaaacggattgctttacctgtttgaacgttttcagaatatggctaaagtgtcaaatgacaaaggccaaacgtggtattactacaaagcattaaacgatcgtgtaggcaatccggtttcccgtaccattgcttatcagagcactaacactacgtatgtgttaggatacgatcgcatattttacgggcgcacgtcaacagatattcgttggtcttctgatgaagttcgtttttcttctgatgatgtaacttttgcgaagctggggaaccagtcagggttagattttgatgttgactcatacaacacgtatgcgcgtctaccgggcggagtgtcgaagtatgccgaagctatggcttgttctagtgattggctctatgtggctgctaagaacgttatgcgccgtattgcgttacgtaacacaccaattgatactgatcctggttcgccgacctttggtgaacgtatttttgatgaagtttcatatactatcgtaccaggaaatgataaaattgttgttaaaaaaatggatgtgctgaatgatcgtctgtacgttctggtaactggtgaagttaaaacggcgatgatggatccaactgtcaaagctaacgtgatcccatcaaacgatgctggcgtttatctgtgggatgagaatgcaaagacgtttacccgtgtttatggtaaaaccgaagatgaacgtttttatatcactcatgaatataccaatatgtcaaccaatggcgatgaagtttacatttctgttggtaactacaaatatccaggcactttgccagatccagatctggttgaaaagtatccggaagatgtgcattcagcggtgaaatacgatcttgttcctggttatactgcgagcatttcgattaactttgctacagttcgagcaaatcagaacgatcctactgtttggaactttgggccgcaagagtactacaatgaagcaaactttagctggcatttccgcgataaggttagcacatggatcaccaatgataaccgtcctctggtggtttatccggaaaccctgtatactctggttactgatagcgcgtctcctgcgtcaacgattcgtgtaaaccatgaagtttgggacaaaggaacagttactatctacttgaataatatcaaatttactggttttacgaagtacacaaacggtgttctgttgtatcgctcaggtggtaggataattggattctatgaactgtcataccgcgcaagggatgaacttactattttctggaaacctgataacactttaatggtggcaagtctggttaatcaggaacgtgaaaacccatacacgccggatattgaacctggactaatagatcctgatctgagtcacatgattactcgttttgctccgcaaagctatctggacaaccaacagttcgaaaaatttggtgaatactatctgcaatatatttcgttgggtagcaacagttactataacaaattgctgaacctcatccggaacaaatatccgagagagaaaaacaacgttgaatatttgtggtctgaaattaaccgccgtaacatttacctggataaaaccaaacgtgaggcagtggttagattttttgaatcacgtgcaagcgatttctattcaacaaaagggattgaggcaagttatacgttcctgtttaaattactgtataacgaagatgtttccgttgagatcgaaagctccaacagtctcgaatatgatattttggttagttcaacaaatatcagtcaggatatcgtaggccggacgatctatacaccaactggacgcgctaacgttacatacatcgaacgtgaatatgaaaatggtcaattgcgttggtcaatgactctgcataatgctcaaggtaactttatcgaagggcaggttgtcaagtcagaaaaaaccaatttcaccggaatggtaattcgtggtgttcgtggtaaacaaatggctaacaactcgatcgactatataaaccgtggacgttcttactacgtgatgaaaattcgttcaaatctaccgacttcccgttataaggatgacgtattgaggtttgttcatccggtaggattcggctttatgggtatcacgatgttaacagtattcatcaactctggtttgtcaatgactcataacgagacaatcattgatattctgagaaactaccgtttcgatagtggttatcctaagttctggcctgatcgcattgcgagcatggacggtaacggaaaccaacaattcgacctggttactggtgaacctctgtacaccgcacacccgcgagcgggggaaccttttgatgtacctccggaatatgacgttgaagaaaaaccgcttaacggtgttcttccttctgcgcgacggttcgatcaaagtccgttgttcgattgctcaggcgttaaatattcacagttccgtaatttggtggatagacgactgaaagatgatgcaggaaacccacgtgatccaaatcctccatcacagattaaggtaggaaattaaatggcacaacaaaacttgtatcggtcggtaattactgcaaaattccgaaccgaaaacttgatgaacttcaaagatatgatcggcgatgccgccgatctaaacacgatttatatgtctattgggcgaactgaatcatgggcggataacgaatccgaccctaactttgccccgccatatccaaatgatagcaccgatggtgttagtgatatgtggacgcatatgatcggggctactaaagttcctggtgatatgatagatgcaattttaccacgtaaagactggggtgatactcgctatccaaacccgaaaatcttttactttaacgatattgttgttgtaaacaccgcgccttataaccgtactgatccgggtaaaggttggatggtttatcgtgtagttgatgttcctgatatcggttcttgctccatttcgagcattaccggaaaacttgaatgtatcaggatcggcggtatctggagtccgtctcatgaatcgagtgaacctccacgcggagaagctaacgggatcgacatgggcgacggctataaatgggaatacctctacacaatcccgccagatgtcgtgatcaaccgctgtacgaacgaacatatcgtagttcctttccctggcgaactggaagaggatccggtacgttggggttatgataacgtgattcaatggtatccaggacaatacgatctagtgtatcggttaaaggtgaattcaatgcgttttcgtgcgtacatggattctcttttcttcccgcaatctacgctccctggtaacaaagggttccgtcagataagtattattgtaaacccgttgattaaaaaggcaagcccgaccgaacctgaaaagaaagcaactggtgattactataatgctaacgcgcttgaacctgattccggacgtatgatttacatggaaaacagacaacctattattcgctcccttgatcagactgaggaagtgagtattgtattcgaattctaaggaaaaacaatggcttaccaaacagcaaaaaaactaattgatgtcggtgaaatcggcaacccatcaacaggcgatccgctttatgatggtggtgttaaactgaacgaaatgatcaccaacgtttataatgcgtttggtgatgtgcgtatgctgtctgcaaacgaaggtgtcggtaacatggtgatccatgctaccggatactatcagaaattaccacgcacttactattcaagtacaccgatcgaactgggttccctgcatgacatggatacttcaacaggttcgattaccgttgttcttccttctggtaaggttggtgaaggttgctacttcataaatagtacgggtagtgtctctgttgatcgtcctatcgcgtttcgtcctcaagttggcgatacaatcgcgggggttgcagaccagttgtacatcacgtcaccttacacctttgtaaaaatctggtgtaccaaaaaagaaggtgcgatcacaacatgggattattctgtagaatctatgttcggttctaaaacgatgcctgttgacactacggcgcttgtactgaaagcaaacccgactgctattcctatgttcggatatatagaatttagcggggctaaggtgctcgtatacgcagaaaacgtagctggtacagttaccaaaatggcagaagttttaatgaccgtggatcgtgtaaacaaaacgatttattcaacggaatacgctattttgaaaaacagtgaagatgaaatgtttacattaaactttactgtcggtgctggtgatgtcgtatacgctaacgtgcaagcgatcaaagaagatcgaattaaattcacgattaaagcaatcgatacgattaaatcagggatcgcgtcatgaaacaagaaattttaataggtcaggttgtagacgatggtacaggcgattacctgcgtcgaggtggtcaaaagactaacaacaactttacagaattgtataacatgctgggggatggtgagatcccccatccagcaggtgcctggaaaacctttgcgggtacgacgctatcaccaaaatttggtgaatcatgggcgttgaataccagtgcaaacaaaatcaccgtaaacctcccgaaaggtggcgtaggcgactataacaaagttattcgtctgcgtgatgtgtggtcgcgttgggctaccaacaacgttagactgatccccgcaactggtgatactatcaaaggttccccaactcctaaagatctgtttaaagattttatggatgtggaactggtgtattgttctccgggccgttgggaatacgtcgaaaacaaacagattgacaaaatcacaacttcggatctggcaacagtagcaaaagaaacgtatattgctactcagggacaaactgacttccctaacgtattcggtgttggtaatgaatacaacctgcaatcgttcgaagtttactatcgcggtaacttgcttttcatcgatgagaaagacggattcaatgctgataactcagactatggatcgattggttctgctcctggtgaactggttgcacttgatggtaattcagtacgtcttaaaaacccgtgtaacgctggtgacacgcttcaatttgttacctatctagatgggttagcaacatggcgttcgagctatgaagcgtatgtgatgcgcatgtatcagactggtgatacttctctggaaaccgttcctggtgaacagtgggtaggtgatctggcaaccaaaaaagagtttacacctgctgaatttggtgttaaccctcgcgtgttgattaaccctaactcgtttgaactgcttctcaacggtaaacaactggttaaaggcggtgacgctgactatccggcgttttcctgtgaaggtgcggaaggtgttgatgaaagtacgtgtgttggtaactctggtgtatgggttccgtcaggacaggattatagtttagtattcactgattctgtagtgacttcaatcaagtttgctcagaaactggaatccggcgacgttgtaacgatccgttggtttaacaatgatattggtactctgatggattgggaaggaactggcggtattaaagaaaaagctgataaggtttatctcaataacgaagaagaagttatattgacgaaccgtatcgaatataccgattataataacccttctcagaaaacaatgcgtaatacaggggaaacctatcagggacgtattctggatattcaggctatgtttgatattatccacccgatcggaaccatctatgaaaacgcgcacaacccggcaaaccctgctgattatatgggatttggtggttggaaacgttacgcagaaggttatttcctggctggctggacatcaaatgcagcggatcctgatttcgcattaaacaataatgatttagatagtggtggtcaaccgagtcatacggcaggtggtacaggcggtgatcgtggtacagaaatcaaaatcatcaacgttcctgaacttgtatcaaaagataaagttctgattgctgatgaaaatggtgctgtgatcattggtggttgtcagttagatcctgatgcttctggccctggatacactaaataccgtgaggatacattgaaagtgaatcatggtaacacattacctgataaaatcaaaactattccaccgtatatgactgcacatcgctggataagggttgcataatggcttacaacaatatttcaaaaacaagggagggcgctcgcgtcctctctaaagaagcagattacttacagtatgatacttatggtaagttgcctctgatcggcggtaaacgttcgatcggcgaaccaaacattgaccaaacaaaacgcggtgttctgtatggaaacgtacaatccgcaattgatgacctgtatacgcttatcgagcaaatcccgattaacggcgttgttaccatgactgaggatgcccctccaatcgctgtacagcaggttgagagcgtttcttttgatggtattgtacagaacatcgattcagaccaagaacaggctgtagttcacgtgtacggctttcctttcatctttgataatgggactaacgccgcaactgtttgtgaaacggcatacaacaaatttactgaattcgttgcagcggaaaaatatttcgcagaagttaaccgtaaaggtgttgatggtacgatcctagaatgtcgatttattgatagtgttccgcacccggcaacaaatatctcagaaaacggtattcgtcaaatcggaactatcgacgtagccgcaaaaaatggctatggttcatgggttaagttgggttctggtttcttacctgatgttactccgcaagtaaccgtgtattacttcaaacgaattgcataaggataacacatgagtaacaatacaatcaaccacgtaagtgataaatccatttacgtgacatttgacccaacaggtactgattggcctgataccataaccaacgtacaagatgcgttggaaaaaataggtagttgggcgcgtactgatactgggcttcctatcgcaacaacttctgttcgtggtattgctcagatcgcaaccgaagctgatattaacgctggcacggataacactaagattgttactccgaaactgttagcatatcgtatgcagaaccctaaagcatcacaaaccgtatggggttatacgaagtattcgactgatgcggaatctacaaccgtaactaacgatgcatcgtctattactccgcgatcgctgaactatgtgttcaataaccgcaaaggtacagaatcggtttggggttcttctaaaatcgctaccactgcacaggcggttgctggtacagataacactgtaactatgactccgcttaaagtcaagcaagcgatcgcgtctctggttccggttcagtcaagtgcgaccgaaagctcgcaaggtctggtacaactggcaacagttgcacaggttcaggctggtacgatccgtgaagggtatgcaatttcaccttatacgtttattcgtttaactgcaactgaaagcaacctgggcgttattcgcatcgcatcacaggcagaagcaaacgcaggtactgatgacaccaaagcgattactgcgaaaaaattaatcaatacccgtgcaactggttcccagttcggtgttgtcaaattagcaacaactgttggttatgtggcaaacaccgcactttcttctaatgcttatgtattgcctagcgatcgtagtgcggtaattaatggttctctttatgagaatagcgcaatacataacaacaaatatcagacgtggacagatcttgattggcatttcccagtaggtgctattgtcatgactggtttccagactgaccacggtagtttgtatatttgtgatggacgttcactgaataaaaataattacccgttactgtttgagcgtataggttatacatttggtggtggcggtgattggtttaacattccagactgtcgaggcgttgcagtacgtggtcatgaccgtgggcgtggactaaaccctaatcgtgggtatggtacatatgaaggagatatgttgggatggcacgaacacccattacaacttatctaccagaacggcggcaacattccgaaatggcaagcagtttacgaactggaaagcgccgagaagaatgaccaaagcgctcgcgtatttgatgcttctataactaaagctactggtgtgggcggtgaagaaacccgcatgaaaaacatcgcattaaactacgtaattcgtactcaatagaggttattaaatgatcatcgacaaattaaatccgttgccgaagatcccgtttgttgatggcgtcccagatgacgccacgactcaaacgaagattctttggatcaaaaacggtgaaactctggacggttcgccagataaagtgtcaaacactggtagtcttaaccgaactggtgtaaacatccagcagaacgcggttcagttagaacaaaataccatcacccataatgataaaatcaacgaagtaatcgatcaggttaacttgattactgaaaacattgatgctattggtgatgaaagcgtaatcaaaaaagttaaccaattggatcaggatgttcaggcattaactttatcgaacacccaaacacagaacaaggtagcacagttaaccctttctgtaaatgctcagaacgatgaaattggtgaatacgatccagaaaaggatcctaaacaccgcacaattcgtaatgatatcatttacattaagaaagaagttggttcatatcctggatttaacgttgatggtgatgttgacccctcttctactggtactggccttaaataccgcgtactgagtaaccaacgtgccatttctatgcaggaaacccgcataaccaaactggaagatgactgggcgctttccgaagtaggacaactgacagaagaggtaaaagaacttcgtgctgaaatgggtgattctggtcttgccacaacccgttcaatctatgcgcgaattaagatccttgaggatggttctgttgtaatgcaaaatgaacttgatgcgattaatagttatatcggtcgcacgtcaggttcaaccagttccattaacgatcgtgtgaacagtatggaaaactccgttagttctctggctacacaaatcaacgatccggtaactggtatcactgcacaaattacaaccatcaatggtcaaattggtacggtttctgttcagggtagtatccgttatgatattgcggaaaacaaacgcagattgatggatatggaaatgattctgggtgaatccggtgatgaaggattgcaggggcaagttgcgatcttaactggtgacattggcgaagattcagatcctaccagtatcaaaggccgtttgagtgttgttgaaggtgaattacgcaccaacactagcgcactctgggaactgcaaggcgttgtaggtaactcttctagtggcctcgttgcaactagccagcaggttaacaaagaaatctatggcgatggtgttagttccgatcctgttactcgcgctggtttgaaaacgacgacccgcaacctgttcactcaggtaggcgataacgcagaaggtaacgaaacaggcatttatgcactgattgccgaccttaataaacgtgttgaggatttagaagcgttgaacattgcacaggcacttgcagatcgcgtaactatcgaagatctgaatgctaaactggctctgtacatcaaagaagctgacgcagatctccgttatgagagcaaaaacccgcctctgtcattcggtactaacctaactggtgatactgaatacactactggcgatccattgtctctaagcgtaactatgaatggtggtgtttctccgctgtcttaccagtggacgaaaaacggtgtaaatgttggtactgatgctaacacatttaccatcgattcgctacagccttctgattccggaacttacaaagtaacggtaactgatgcaagccataaagtcatcgtttctgatgaactggcgatcactgtcgcttaacgattaacaaggggcttcggccccttttgaggatctttatgattacgaacaacccagcacaattaaaagatgaaattctgcgccgtttaggtgctccgatcgtcaaaatcgaagtgacaaccgatcaggtttatgactgcattcaacgagcattagacctatatgcagaatatcattacaatggatctaacaaagggtatatcattcttaccctggggccggacaacccgaaaaatattttcgatctgagtaaagaacacattttcgcaattactaaagtgttgcgtactaacatgggttcccttgtatcgatggatggtactgcggtttatccgtggtttactgatttcctgatgggccttactggtggttctctgggcgggggtggttgtgcatcacgtacctacggaatgaacgcatacggcgcggatatgggctattttacccagatgatgagctatcagcggtcaatgcaagatctcctgtctccgcttccggattactggtataacgacgacacaggacagtttgcagtatacggaaccgttaaagatggtgatattgttgttatcgaagcaatgatcagatcctttgttgatgtacccagtatggtcggtaacgtcgctggatacgctacagcgggttctgatggtgaagataagccaactatagcagatatatacaataacccctacaaagccgtctcaggcggcgtgaaggctggtcaaggtacaggcgttcagagttcatcctctgcgtataacaaccgttgggtgaaagattacgcaactgctcttgttaaagaggtaaacggtcaggtgctggctaagtttcagggtatgcaattgcctggtggtgttgctccggatggaaccagactgattcaggaagctatgcaagaaaaagaaaacctccgtcaagaacttctgttactgtctgatgcacttccagtgttgatgatgtaagggggaaaaatgcaaaattgggatgaaagtctgtttgcacagttagaagatggttccggcgtcgatcggaacctaagacaagaagtaacaaacccgtatgttaactggtacaagtataaccctactcaacagttacatgattcactaacagccgaagcaattcaaatgaaatctccggatatgtattacgtccgtcgagaatttgttaatattgataaaattttgggtgaagaccgtgaatcgaagtttacaaaatcgtggaaaattgcagcatacatcgattcgtatgcaaactacgaaggacagagagacttttacagcaaattcggtatgatgtcaaacgatgaaatgacacttgtgatcaatcctcgtttatttgcacatcaaactgatggagggatccctgttctgggggatttgatttatttccctatggataatagcctgtttgaaattacatggattgagtttgatccgttcttccagttcggtgatcgtcctcaacgtaaaatcaacctcgttaaatttatctatactggtgaagaattggatcctaaactgcaacgaaatgaagggattaaccttgctcccgatgctgatctggatctcgaacctattcgaaatcttgatggattagcggataccaatattgaacagtacgaagaagatcaagcctttgaagatgaaggcgatgaattcattgaatcgtttgatgttgttaacgggcgcggatcaccgttcgcacagttcccataaatataaccaggggaaaccctatacatgtaagggtataggagaaatcttatacccgctttaacccatacaggaaaaataaaatgtttggattttggtataatagttcgttgcgaaattatattgtcttgatgggttgtcttttcaatcacgtgcaagttaaacgcattcgcggcgaacaagaaaaatttatcaaggttccgattacctacgcatcaaaagaaaaattcctggcatccatgaacaagctgaactatgcatacagtcaggaaaatgttgctaaaacggaaacaattttaccacgtatgaatctatccctcgttgatttgcagtataacgcaattcgtaaaactgggatcgcggtaaaccaaaaaatgacgcagttacgcgcacctggaaaaacagtaacgcagtttaaccctgctccgtatcgtctcatgttcgaactgggagtgtatacccgttacgaagatgatgtgtttcagatcatagaacagatactgccatacttccagccgcatttcaactgtcgtattacagaattacataaaaacgacattaaaatagaccgagatattaaaatatctctgcaatctgtttcccctgataccacgtttgaaggtgatacaacgacacggcgacacattgaatggtctttaatgtttgaattacagggctacctatatccgcctgttaacgagattaaaggcgagatcagaacagtatacacggatttcttttccaatatgaacccgttggacaaagataattttgaatccgttgatgctcaggtggatccggttgatatgcctatacaggattacacgggagaagaatacattcaaacgtatgctaatgatatcccaattcctagcggtgatcaacctcctaaaccgaggggccaataatggaagaatttagcgtaaaacaactacttgatcttgaaaatctccctggtgctgaaactggggaagaaatggttgtgtatgaaaaacttgaactcgttgatgtcgagtcacacccagcagatcgaaaacctgatttagaggaagactatgcacttgcgcgtaaaaccgcgcattacatgaatcagatgatcatggatatggcacaaattgccttgcataacgctaaaaactctgaatctccgagacacgttgaagtttttacaaccctgatgaatcagttaaacaattctaaccagggattgatgaaaattcataaagaaatgcgagaaattaccgaagaaaaaaccacaactaccccgcttcctgaacaaaaggataaaggggttaatatcgaaaacgcaactgtttttgttggttctcctacagagttgatggctatgaaaggtagttcttacgacgcaaaagatgcgattgccggggaatgtgaggaagtatgaccgaaccagtaatgaatccagaaaaagaatcagatcatcctttgaatatgatgcaccctaaatacctgaaacgaaaaatcgaagacgggatggaatgggtacaaagtaaccatgatgggaaatggtatccaaagacgtttaaagattaccttaaaattaacggtatcgaaaaagtaacgttacaggcaaaggataagaaaaatttcgccacctttaaagacaaagggaataagcgaagccgttacatggggatcccaaaccttaaacgtgcgtatgtccaaactcaatggacaaatgaaatggttacagagtgggttaaatgtcgtgacgatattatctactttgcggaaacatattgcgcaatcacccacattgactatggtactataaaggttaaactgcgtgattaccagcgagatatgctaaaagaaatggtatcaaaccgtttctttattgcaaaacttagccgtcagttaggtaaatctacttgtacggcgatcttctttgcacatttcgtttgctttaacaacgataaagacgttggtattttggcgcataaattgtcgatggctagtgaagttttggatcgtgtgaaacaggctattgaactgctccccgatttcttacaacctggtatcgtagaatggaacaaaggttctatcgaacttgataacggctgctccattggggcatttgcaagttctccagactccgttcgtggtaactcctttgcattggtttatcttgatgaagccgcgtttattcaacagtgggaagatgtctggttagcgttaaaaccaattatttcttctggtaggaaatcaaaaatatttttgacaactactcctaacggaatgaactatttctacgatctgtggaacgcttctctggaaggaaaatccggtttcactacatacgaatccaattggacttcggtcaaagaacgtttatataacgataaaaccgatgaattcgatgatggttattcgtggtctgctaatgatattggggcaggtagtcgagaggcatttgcacaggaacacgaaggcgcatttaacggaagtaacggaactcttatttccggctggaaactttctaaaatgtcatggattgatattgaagaaaccgaaagtaatttttatcagtataaagcaccagaagaggggcataaatatattgcggtacttgatccagccgaagggcgtggtcaggactatcacgcgatgcatattatagatattacatctatgccgtttgaacaggttgctgtataccattcaaacaaaacatcgcaccttattttgcctgatgtcctgttacgttatcttatgatgtacaacgaagcatgggtttatatcgagctaaatagcacaggtcactcagtggctaaatctttgttttctgagttggattacgataacgttatttgtgatagctatagcgatttggggatgaaacagagtaaacgatcgaaagcgattggctgctcaaccctaaaagacttgatagagaaagataaactcatcataaataacaaaaagacaatacttgaatttcgtactttctcagaaaaaggtgtttcgtgggctgcggaagaaggtttccatgacgatctcgttatggcgctggtttgctttgcatggctaacaacacaaatgaaattcgcagaattttgcgagaaagacgatttgcggttggcaaatgaggtattcgcacgtgagcgcgaactgctttatgaagatatgttatgtcctgttatcgtaacgagtggcgacgaaacaatatctgtcggccaacacggtatttcgtttatataaatttagaggaaacttaataatggctttaatctctccaggcattgaaactaaagaaacatcggtacaatctaccgttgttcgaaattcaactggtcgtgctgctattgttggtaaattttcatgggggccagcttaccagatccgtcagatttctaacgaagtcgaactggtaaattattttggctccccagacaatgacaccgctgattatttcatgaacgctgtaaactttttacagttcggtcaggatctgcgtgttgttcgtgtcgtcgataaagaagccgcaaaaaacgcaaccgcgatctataatcagatcaaaaccacgatcaccgctgctggttctaactatgcagtagacgatcaaatcaaagttaaacacaataacgttgttattgaagaagatggcgttgttaccagtgttgatgatcagggtaaaatcctgtctgtgttcattccgagcactaagatcatcgcacacgctaaacaggttggtgtatatccggatctgtctagtggctggactacagaaatcgtttccagttcttctggtgtttctgctacgattacaatcgacggcgtagaagttgatccgggtattactctgctcaaccttgacaccgcaaaagaaactattcaggcaactgctttccaggaactttgcaccaaataccagctaccgtctgttatcgcaatttatcctggcgaaatgggtagcaccgtaacggttgaaattctgtctaaagctgcatacgattcttcggctgtcattaagtcttatccttctggtaagtctggtaaaaacagcggtcgtagttcgatgaactttggccctcagaatgataaccaatacgcgtttattgttcgtcgtggcggtattatccaagaaacgtttatcgtgtcaaccgctaagggtgataaagatatctacggttcaacgatctacatggatgatttctttgcaaacggtggttctcagtatctgtatggtacgtccctaaactggcctgtcggattctccggcgttctggaactgggcggcggtacttctgcaaactccactgtaggcgctgatgaactcatggctggctgggatatgttcgcagatcgtgaatctctgcatgttcctctgctgattgcgggtgcttgtgctggcgaaactgccgaaatttcgtctactgtacagaaacacgctgtgtctatcggtgaaacccgttcagattgcgttgtattcgtttctccgccgcgttctgctctggttaatatcccactggctcaggccgttgataacctcgtagaatggcgtacaggctacaaaatcggtaatactaccccagttgataacaacatgaacgtaagttcaagttatgcgttcatcgacggtaactataagttccagtatgataaatacaacgatgttaaccgttggatcccgctcgcgggtgatatggctggcctctgtgtttataccgatcaggtatcgcaaccgtggatgtctccggctggctacaaccgtggtcaactgcgtaactgcatcaaactggctatcgaaccgactaacgcgcatcgcgattctatgtaccaggtacagattaacgcggttactggtttctctggtggtgctggatacattctgtacggtgataaaaccgcaacgactgttccaagcccgtttgaccgtatcaacgttcgtcgcttgttcaacatgatcaagaaagacattggcgataacgcaaaatataaactgtttgagaataacgatgatttcactcgttcttccttccgtatggatgcaggacagtatatgtctaacgttcgcgctctgggcggtgtatacgattaccgtgtggtttgtgacactacgaacaacacgccggatgttattgatcgcaatgagtttattgcatcaatctacgtcaaaccagcacgttctatcaactacatcacactgaacttcgtagcaacctcaactggtgcggatttcgatgagttgattggatcaacgtcagtataacatgtaaggggctgaaaagcccctataaatacacatagaggttagaaaatgcttactgatattgtacgcgcctttgaatccggtgatttcgcacgtccgaacctgttcgaagtagagatcccgtacctgggcaaaaactttaaattaaaatgtaaagccgctactatgccagcgtctaccgttgaaaaagttccggtaggttacatgaaccgcaaaattaacgttgctggtgaccgtacctatgatgactggacaatcacggtatataacgacgatgcacacacaacccgtgatgcaatcgtagcatggtcaaacatgctgcatggtatgggtgaagacattacaggggatatccctgcaaactacaaaaaaaccgctacggttaaacagaaaaaccgtaacgacgaagtaaccgccgaacataccatttatggcctgttcccgaccaacgttggtgaggttactttagactgggatagcaacaacgaagtgagcacttttgagtgtactttcgcgctagactggtgggtttaaacgctataaatacaggggtagcaataccccttatcattatttttcggagttgtaaatgaacttttttggattagacaatgtgttagggtttttcaaaaatttcgccaaacaggatgaaatggaatttgaagcccaattaaaagatgatacaggttcgattgcgcctccgaaaaataacgatggggcgcacgaaatcgaaacggacttatcaaaccagcgttattcttctgtgtttcaacagttctattccggacaggatccgcgaattcagaacaaaacacagctaataaatacataccgtggcatcatgacatatccggaagtggaaaacgctgtttctgaaatcattaacgaagcgattgttaatgaacaaggaaaagatattgttacgatggatcttactaaaacgaattttagtaaaaacatccaagataagatcatggaagaactcgataccgtaatgaatattcacgatttcgataaccgaggctctcgtttattccgtgattggtatgttgattcgcgtatctatttccataaaatcatgcacaaaaatgaagctgacggcatcaaagaattgcgccagttagatccccgttgcatggaactgatccgagaatcggtcacagaaaccctacccggtggggttaaaattttccgtggctatcgtgaatacttcgtatacaccgcaccgaaaaacggttatagctacaacggacagatttatagtcacaatgacaaggtaaaaattcctcgctctgcgattgtttacgctcatagcggccttgaagattgcgacaacaacattataggctacctgcaccgcgcggtcaagccagctaaccagttgcgtttgctggaagatgctatggtgatttaccgtattacccgtgcgcccgaacgtcgtgtgttctatatcgacgtaggtcagatgggtggccctaaagctacacagtacgtaaataacattgcacagggcttaaaaaaccgtgttgtatatgacgcgagcactggtaaagttaagaatcagcaaaataacctgtcaatgacagaggactattggctgatgcgtcgtgatggtaaagcagttaccgaagtttcaacgcttcctggtggcactgccttctctgatatcgacgatgttaaatggtttaaccgtaagctgtatgaagcgttacgtattccgttaagccgtatgcctcgcgatgatggcggtatccagttgggtaacgatggcggtattacccgcgacgaattgaactttagcaaatttattcgcgaattgcaaattcaattcaaccctgttcttgcggatccgttaaaaactaacttgatcgcgaagaaaatcattacagaagatgaatgggatgaaaacgtaagtaagattgcttttgtatatcagcaagattcttactattccgaaatcaaagatattgaaattttggaacgccgtttaaacctgatgggacaacttgaaggggtggtcggcaaatatatctcccataaatacgtaatgaaagaagttctccggatgtctgatgaggaaattcaaagcgaagccaaacagatagaagaagaatcaaaagaagaacgttttaaaaatccagaagcggaagaggaaaacttttgatgaaagaatttatcgaagcaatcaaaagcggtaatctggtggaagctaaaaaaactttttactccatcatggaagaccgcaaagaagcgcttcgtcacgaattgcgcgttgaacttgccgaagctgtacgcatcgaaggcgaagaagacaaagaaaaagacgacgaaggcgctgataaagatgacgaaaatggcgataaaaagccagccgaggatgataaatccgataaagatgatgagtgaggtgtgtaatgcaacttgacatcgaaatcaccgccgaagatctccaggaacatttagacgaagcgaaagcccgtgtagatattctgggtatcgatgaaggcacggttaaaatcatcgaaaatttggcggtcaccgaaccaaatttagcccttgctatgatggcggttgttgaaggtttaacacttgatgaggtaattgtcaagcatgttgattcccgtggcaacgtagaacgcctcaaagacaggaaaacccgtgagcgtaatgcgtatcagactaccggattaaccaaatcccaacgtcgccagatcgcgcgtcgtgctctcaaaacaaaacgtgctaacccgtcaattgctactcgcgcacaacgtaagcgcaagaaagcattgcgtaaacgtgctgcactggggctataaatatgaatgaatcccaaatcaacgaaaacggcgatatgcttttaatcgaagaatggggtttaccttgcggtgacgtttcagaatctattttagaatctgttggggaatcaaaagacggtaaattgcggatcgaaggtattttccttcaagccgaaaaggttaaccgtaaccgtcgtttgtatcctaaaaacgtacttgaagaagcagttaacgattatattagaactcaagttaacacccgtcaagcattaggtgaaatgaatcaccctccgcgcccgaatgtggatccgcgaaatgcttgcatcctgattgaaaaattgtggtggaagggtaacgatgtttggggccgcgctgttgttgttgaaggcgacggtggtgatggtgacaaactggcggcgttgattcgtgctggttgggttcctggtgtttcttcccgtggattaggtaagctctccgattccggcaaaggctacggcgttgtacaaaagggctttaaattagctgtaggcgttgatgtcgtctgggggccaagcgcacctgatgcatatgttaagcctatagtggaaaatcagcaaagcaaaccgcttgttgagaataatagtgctgatgacgcttttcgggaattgtccgagcgtttgaaaggtctataaatacattaaacaaaacaacaggaaaatcaaaaatgcttaaagaacaactgctggcggaagcccagaacctggatactccggtcgagttagacagcattttcgaatcagttgaactttctgatgacgtgaaagcgacattcaccactgtattcgaacaagctgtaaaagctggcgctgcaaaactcgctgaatcccacattacccagatcgcggaacgttccgacgaactggtcgaagctcaggtaactgaacgtgccgctgaaatcgaaactaagctgtacgaagatgctgataaatattttgcgcacatttccgaagaatggctgaaagaaaacaaagaagccgtttcccgtgacatcaaagccgatctgtttgaatccctgatcatgggcctcaaagaagttctggttgaacataacgttgtcattccggaagaacaggttgatgtagtcgccgaactggaagacgaactgactgagaatcagcaggaagttaaaaccctgtttgaagcgaatcaggaactgaccaaagaaatttcagaaatgaaacgcaatgcagtagtttcagagaaaactaaaggtttgaccgaatctcaggtcgaaaaagtagaatctctgattgaagggctggaatattccacaaccttcgaaaataaactcagcgcaattgttgaaatggtagcaaccaaagctgaaaaacccgttgacgagtctgtaaatactccgcaaacgaaagataactttgttccggtagtagaaagtgttccggcagagaaatccaagatcaataaatatgtacaagcggcaaaagccctttcttaatttcaaaaggtaagaaacaatgtctaagaaaaacgaattgatggaaaaatggaacgatcttctggagtctcaggaaggcttaccggatatcgctaccaaatccaaaaaacaactgattgctgccattatggaagcacaggaaaaagacgcagaagttgatccggtttaccgcgacgagaaaatcgttgaatccttcggtggtttcctggcggaagctgaaattgctggtgaccacggttacgacgcaaccaaaatcgcttctggtaactcaagcggtgctatcaccaacatcggccctgctgtaatcggtatggttcgccgtgcgattcctaacctgatcgcgttcgatatctgcggtgttcagcctatgactggccctactggtcaggtgttcgctctccgcgcagtgtacggcaaagatccgctggcttccggtgctaaagaagcattccatccgatgttctctccggatagcatgtactccggtcagggcgcggctccgagcaacggctttaccgaactggcttccggtactgcgatcgctgacggtgctatcgtgttccacgatttctctgaaactggtcgtgtgttcctccagaacgtttctggctctccggttactgtaactggttctaccgacgatgctctggatgctgctgttatcgccgaacaggaaaaaggtactctggctgaaatttcttacggtatggctaccagtgtagcagaactgcaagaacagttcaacggttctactggcaacccgtggaacgaaatgggcttccgtatcgataagcaggttatcgaagcacgtagccgccaactgaaagcacagtactctgtagaactggctcaggatctccgcgctgttcacggtatggacgctgacgccgaactgtctgctattctggcaaccgaaatcatgctggaaatcaaccgcgaaatcgttgacatgatcaactataccgcacaggttggtaaaactggtttcactcagaccgttggctctaaagctggtgcgtttgacttccaggatccgattgatgttcgtggcgctcgttgggctggtgaaagctacaaagctctgctgattcagatcgacaaagaagcaaacgaaatcgcacgtcaaactggtcgtggtgctggtaacttcatcatcgcttcccgtaacgtggtttccgctctggctcgtatcgatagcggtatcactccggcaggtcaaggtctccagaagactctgaacgttgacaccactaaagcagtattcgctggtgttctgggtggcgtgtacaaagtatacatcgaccagtatgcacgtggtgattacttcaccgtgggttacaaaggcgataatgaaatggatgctggtatctactacgctccgtatgttgcgctgaccccgctgcgtggttctgatccgaagaacttccagccagtaatgggcttcaaaactcgttacggtgtaggtatcaacccgtttgcgaactctcgctctcaggctccgtccgaccgtatcacttctggtatgattaccaaagaaatgttcggtaaaaacgcatacttccgcaaggtttatgtgaagggactttgatcctaattcgttgaaaaataacgatattaaagggaaccttcgggttccctttttgtttatataaatattgaaaacattcgaggctatattatgaaacatatcatttataagataacaaacacaatcaataacaaaatatatgttggtgctcactcaaccgaagatatcaacgattcatacatgggttccggtattgcaatcaaaaaagcgcaaaagaaatacggtatgaaacatttcataaaagaaatacttcatgtatttgatacccgtgaagaaatgtatgagaaggagagggaaatagttgatattgaattcataaatcgaccagatacgtataatgctggtattggcggtaaaggtgctccaatggcgttgattggatggagtgatgaacaacgcaagctgatttctgaaaatacttcgaaagttatgcaatctccagaaatgcgcgaacgtctttcaaaaatcaaaaagggaagaaagcaatcccaagaatccaacaggaagcgctcagagacgttaaaagctaaatatatgaatggacgtatagacagagagtataaacctctcacagaagcgcacaaggcgaaattaggccgttctgtatcgatagatggagttgtatactcatccggatcggaggcggcaaaatcccttagtatgtcccactctggtttaaaatatcggattaatagcgacaaataccctacctggaaatttgttgcataaataccattatacactttacgcaggaacataaaatgagtgaaaaattttacacaattaacaagctggtgcgtcagtcacagctaccgcctggcctgtctaaaaaggttcttgatgaggcaaccggaacagaaacaattaacgtagctaatacccgtccggatctggtatctcttacccgtgcggtaaacaacctgatctacggtgaacttgtagcaattcaggaaactaatttgcctaccgcaaccctgttcggtgtgcgttatcgtaaccctaaaggcgatatgacgttttccagcgctgctacctattccggtaagtatgcaagccgtgataacattccagttggtgcggttggtactgcctataccaaaggccaagtttttaaacatccgacaagcgatgtcgtatacgaagcaactgatagcgtaactctcgcaggtgctgatattgatgaagcaattatggtcgcagtattcagcaataaattacgcctggcaagcgaagccgcgccaacaagtcagtatgaaaccagcgaagatattagcacaacttctttcgaaatggatcgttggaatatcaacgttcgttcccgtaaattcaaaactgaaatgaccgtggaacttatgcaggatctggaagcaaaccaattcaacgcagaaaatgtgattgaagatgttctgggtactgttgccagcgaagaagtaaacaaagatatcatccagactctaatcaacgtatcacatcgttacaacgttgatggtgtggtaacaaatggcattttcgatgctacaaccgcatacactgcaaaggatgctccggctttaggtcgtttcctgtatcaattagtgtgtgaaatggggcaggaaatgaatagaacgacttcatttgaagctacctatgttctggcctcttctcgcgttgtaagcgttctgtctgcgtctggttggatgcatgaaactgatgaaacccacccgttagcaacaggtcgacttaaaaacggttactatgtctatactgacaccaatacaccgtttgattacctgctgactggttgcaagtacgatctgggtgaaatggatcatgttggctctctgttctatacgccatacacagaagctgatcaggcaggttcgatcaagatttctgttgatcctcaatccttacagcctaaagttgctattctgatgcgctacggtttatcggttaacccgtataccactgctgcaaacgaaagacttgtgaaaggtgatgactgggtaaacctctcaggtaaatctaagatgagtcagattgtgggtatcaaacttcctaaactgggttgatagtataacccaacggggataatattcaataggtggagtagggaaacttactccatcttttaataattattataattaatattaaattagatcttgaatttataaatgatttatgataaaatttattaattataattattatagatcaaataatttttgaaatcaagtaaaaataaatttgattttattaattagatcatgtataattattcttttaataatatattatattagatcaaataaaatttgactacaaattaatatagtatattatagatcaactgggtaaattggtgagtatgttatgagtttgaaattagaagatctgcaaaatgaacttgagaaggatatgctgatagatcccctcaagttgcaatcagaatcagcggatatcccgaagatttgggctaaatggcttcgataccattcaaacgctaagaaaaaattgatccaacttcatgcgaaaaaagaagctgatgtgaaggatcgtatgttgtactacaccggaaggcatgacaaagaaatgtgcgaagtggtgtatactgggactactgaaattaaaatcgcgatcgctggggatccgaaaattgtagaaaccaacaagctgatccagtattatgacatggtggtagatttcaccagcaaagcactggatatcgtcaaaaacaaaggatactctatcaaaaacatgttagagatccgtaaattagaaagtggtgcataatgtctactgaaaatgaaaaatgtgtagtgtgcaagtgtccggttccttctactggttttgtgactgaatctgggcgcgtgtgtagtactatctgtgctgactacatcgcagaaaaaacaaaaaacggcgagatcaacgaatccgatgatctgaatgaagttcaaatgttgctgtaggaggatcttatgattggatacggtgaaggaattacagatcgtgatgaacatcctgatttttagtgcataaatactagcgtacccgaaaggggcttgataaaagaatgctggatgataggcgtactcttttgcgccgtccgatggagtttaccttcggcggggtgattgataatataccttcgatcaagggcatgtgaatagaatagccagaatagtacagcactggcgttaagcaaatgtacaaaagccccttcctttcggttggggcttctttttagaacttttcttcttctccgctttcgagttcggcctttaattcttcggctcgacctttcagcgcatcgcgcatagaaatatcgtctgacggcgcaacatcaacttcttttacacgatttttgtaatatttttcaagctctttaaggccgtccatagtacggcaagaggcgaccttgctcatgaaatcatcaatagccgcctcataaagtcgaaaatcgttgaaactcttcattttgacctctaaatttcgatttgtttgatcacgtagtcaaacttttcttcattgtaaatgcgtactcgttcgattgcgtgtttcataccatagtttttgtatgaatatttatttttagcatttttggactttgccagcgttgctaagttatcaaccaaatcccaaacagtagcaagagatttagaatcatgtttacgcagtacgcgcccaattgactgtttgactataacagcagatttgcaaggatgtccgaagatgatgtgatgcaggttcttgacagaaatacctgtactcagtacaccaatagaaccgattacgatcagccccttcgttgattccgcgatccgtttcatttcgtttcgctcatcaatccccgtttccccagaaatgtatacaacgttgtcatatacctttttgagttgctcatacagccatttaccatgtttgatctgattgaacatcacaaacacgttttcatctttttcccttgccagtttcaacgccagcttacagatccatgcgttacgcctggtatgcgatgttatatacttgatttcgctttggtaatcggcccccttcattttcttaatctcatcctctttgtatctcatgaagatggtattaattcgaaggttggtaacttgaccttcctgcatcaatcgatttgtatcaactggcttgaagatttgaccaaaagcgccaatgtattgcatcatgtttgctttgccttctttcagagaaccagaaagaccaaacttgaaaatacactgatccattgtgttgatgatcttctgtatgctttgtcctgttgatttgtggcattcatccaccatcaaacacatgaactgctgaaaccactcaggaggcattttaacagccgattgccacgtagacacgtagatcaatgcattactgtttttagcagttcctgaacgtattccaagcattgcctcgcgaggcaaaaggcgatagtttacaatatcaccgatcatctgatcaacaagggcggttgttgggacaatgattagtactttgcctgtgtaattttccagacaccaacgagatatcaacccctggataagagatttacccgctgacgttgggaggttaagcacagcacggcggtttttaatcgcatggaacaccgattgtttttgataccaatacggatcaatctgcttgtttccgtcgtatactgggtgttcttctaaccacttgtcaaaatctggctgggtaatttcttctgtttcgtggatcttaggatccatccagatagaatacccgcgagactccgcgaattttgttacaagataggctaaaccgtagggcagtttcccgttatagtccatcaagtatatgtagccgttccatccaccatatttgtattttgcctggtactgataacctggcggctggaagctgaaatagtcgcgcaattcatagactatgttagcctctgcctgaatctgcacatgactagtgttaaggaatttgacttcgatatccactatgtgtatcctatatacggtttatatgaatatttataggctaaataatgataaacattggagaactacaatgagtattgattacgaaaaggttgaaggtttcaaagccttagaacaaaaagaagccaaattacagcttgctacctatgcgcaagaaacgtttgatgtcaaactgaaccgccagaagtcattcgaaaatatgcttgctgatctggaagctgccgtaccagcagaaaagccggaactgttgatcgactcccctgatccggaaattgttacatacgaaggtaaacaatccgttcctgatgttgttattgatgtgactaacgattttatggattacgttaaagaggttgctccggaaattgcagaccagattgaaattgttcctgacgctctacaagctactgtaagtgattctgagacggtttctgatgaactggcatggatggaagggtttaccccgtctatcatcatgatgggccgctctgtttcgaatactggcttttatacgtgtccgtattggatctatgattggatgaaacaaaatccggattggtacaagcaccctgatggttgccctcattattcagcgcgtcaaaccctcaagtcgctggcatggtacatgcatcgtgatgggatggttactgtacgggaaaccagaaacagccagttcgacacgttcaaaaaataattttaaaaagtagttgaccttaccctgctattcgagtatatttgtattcgaaggcgggggaatggctctcgcagtgaagaaggaaatacaaaatgaacatgatgaaaaatgcttactacccagttctgtttgtttggactaatggtgaagttaagaaaatcgtcaattctaaagctccttattacactgttggtgaagcacttcgccacgctgcggaagcaaattatcctgctcatgccgaacctggttatgctcgttggaacggttctaaatgggttgctgatacctgggacaactacgaagaagaaagaatggagtgtgatcctgattacgtatctcgtcaaatggaagctcatatgattgcagatcgtagactggataatgaagctcgcggattttattgattaacaaggggctacggccccttttcttttaggtgaaatatgaacttaaatcacgaatgtttaaaagatttgagcgatggtaacgagattggtaacgttatttttcttgatatcgatggcgttctaaataatatgcggtgcatgaaatttggtgaacatatggacatcgaatgcgcacgacacttacgccggatagtgaatcacgctaattgtgatatcgtcatttcctctacgtggagaatcggcaacagtacccataatctacgtgaaatattttatccgtggggattgtatcggatcattggtaaaacttgcactaacttccctcatagcactggaatgcgtggtgatgaaatcaaggcatggatcgatactttcggatgtaaaaactatctcattcttgatgatgacaccgatatgctttcttcacaaaaagatcattttattaacactgatgggtttgttgggttgaccgaagaacaatccacttatgcgatccgtaacattttcggggttactactccgttttgtcctgaatgcaatgggtatggacgtgttaacggctacgacaaatgcggaacgtgtaacggtaaaatactccggctataaataccaataaacataagaggttaaatttatggcaattccttctgtaacaattagcgccaacaaaaacgaacttttgattggcgaaactttgaccttagaggttgaaactactgaactagatccgggtgatgtgtttctggcctatcgttggcaaaaagatggtgtagatattccaggcgcaaccgccgatacttacacaactacggttgacggtacaactgctggtgattataccctgatcttaaaacacggtgctgatgaagaatcagcaacagaaaccacgtcagatacaatcaccgtgacaacttattctgatgatctcgtttctaaatggacggttcacccgattccgtggcgtgataccagctttaccccgatcggttattgggtacttgatgaaattctgtatcagaaagcacagggtaaagattggaaaactgattatgctgattacaagtatagtgaggaagtacaaacgatcctgaaagcgttcatggaaaacggtgaatgtgagatccaggattcacgaaacggctatattcataaaatgagtgaaatctaagaggctttaaatggcaactgaaaaatggactacggttcatcctattccgtggagaaataccagttttacatatcttccatactggctatacgatattatcgttgatgcttttgagaaaggcgacgactggcgcgattatgcggaagaaaaatataaattagagtttgatactctgaaagaggcgtttgaagattatggtgatattcatgtaatcgaatctcgtaatggtaaactggttagtctgttgtcattgactcctgctcctgaaccagatcctgaccaataaaataaggcaaacaatgaatacacttctttttgatttcgacgacactttagcagaattttctcagactttttatgataagttcggtgtacgtccggaaggaacgccaaaagaacgatatgacgaaatggcggcttctttggtgcgtactgatttttataaaaaccttccccgtattcaggctgggattgacctccttcaatggagtttccaacgccgaatcggtgatcctgctactttgctgcttcgcgcggaagcggtcagccctctttgggttatgaaagaaaaactgaactatactgataagatttgcgctgaactggggatctctcgtctcgattttagtcgcattgactatccggaacagttcgcagaacatgcctatcgtggtgttctgatttcccgcaaccagaaacatcttgaaatctggaacaattctcatctagctaataaagttccaggtattttccttgcggaaaccctggaagaaaatattcagctagtcacggaagcgcttgcaaaggctaatcaataacaaaaaagggaaccgcaatggttccctttttttacaatctttttaattcatcaagcgctgttttcttatcaccaacaaagaggattgctttacctcctgcttttctgaaaggcaacaccgcttttgcccgatcgtcaaacagaattcctttaccagcgaatgctgctttttcatggctacttttaacgtagtggaattctggaacgtaacccaatactttttgtaatgctttacgtttttgttcggcaacaccgtcagaattgaatttaccgacactggttagtattgctacatcgccaagtgttcttaaatgatggaataattcaaatccttctttgattggttccagattttcgtagaaatcagttttggcaatttttgctttgcactttttcaactcatcttctgtcatcatcgagggttcgccatacattggcacaaatgaaccttcccagtcgaacaatacaccatccatatcaaagaaaaacttattcatatcaattcctcagtttgtgtatgcatactataatgtttaatcattaatgtcaatcccaagtgtcagttttcggtgcgtatgctgcaactttagccacaatttccttatccagttcagctacagatttctgaggcttaccacgggctttaactttgatgtagtttgacttaacaacaaacatccctttgttacctgatttcttgatctcgctatcaacaccaactttgttaaagctgatccaaatgtcgccgtccatatactgtttaagagaatcacccatgttcaggatcttcgccatagtaagggccgcgccttcgtgggtatccatgagaatttctttaggaactacacgatcgcgtttctggttctgctgcatagcaatatgcacatcgttcataacccatacgatatgtacgttttcttttttgtatcccagcgtttcgacatcacgcgcgatgcttgccagcttgctcatgccttttaacgttacgtcaaagatgaggttaggtttacgatcttctggtgctgccataataccggaataaacacggttttggtttttgttggaaatgttgaaaacgtcggcgatcacatgatggagggtagatacgttttctgggtttttgaggttcattgttttgacatcatgacccgtttgtttcttgatctctgctgcgagtttatcgctacccattacaagttttttcagggcgtcaacgtccagtgtaataccttcgatgcctagcagtttttccagtgtgaatcctttaccggaaccagcaccgccagccagaataacaacctgaccaaacttaggataagcacggcccccgaaggtgatcagcgcttcggttaaggtgctttctgtgaattgtttaaatgacttcatgtaaaattctccagtttattttctattatttattgacatgctttctgacagtggtgtatggttatggtgttcgacggataggccggaagaactttaaaccataaggtatatgatatgaaaattgatttacatcgcttcattgcagaattttcccgcgaccgcgacatggactctttcaactactactcccgtgaaattgaagatcgttttgcggctcatgttgggttccgtcgccaccatactcctaaaatgcgccctgaccacgatccgaagtatagccctatcacatggcaagccccgatcaatggttacgttgaagggatccggatcatgacttttaacgcgatgtatggaaacgctttgatccatattgcacgtgagaaaaaggcagaattccctaacggctggcgtattgatgaagtgattcaaacccttatgcagttacgacgtgaatacaaagctggtatgtgtctgcgtaatgaacagtatccgatgtataaaacgtatgcctatatctctaagcatctaattaattccatgttttacatcgttggtaatcatggttccgctatagatatcggttcttatgaaatcgtggcttatgctcgcgaacaaggaaaggccgctgcactgaaaatcattgaatctggtgctatcattcttaaccatcgcattgatactattgcttactatggcgatcaggttgaggttgaaggcgtacaccatgaacgattcaacaaagccgtatttgctaaaaatggttatgcttatggtaatgacattataacttctgctattcctttcgttcgtctaactgttgaaggatttggagaaaggttgccttataaactgtcagaagctcaaatgtgtgcggctgctgaaagaatcgccaaaaagcggaaaatgtataccgatgaatacctggcgtatgtcaacaagacaaaagaagatgtagatcgagaaatttcttgcatggatttgtgcctttgatataatgtaagcatcttttaaagggaggatgcatgaaaacgatacattgcagaaatgaaaacgttgtttactatcacggttcgtgtactgctgctggtattgaaagcatgttattgcctccctgtgattctgatactctgtctgaaaaaggcaggaagaaaaatttagaccgtgttttctttaccgctgatatcgggttagctcgtatatacgctggaagggccgcgcgttctataggtggggatcctgttctgtacagggttgtgtgtccggttgatgttgtatgcatgaacgaagacaaaggcgcgagcgtttaccatgcagcatgggcgttttgtgaggaattatgaatgataaagtgttggcgtatctcgttttcttgctgggatatcgcttagaagtgatgggcgcgtattcatcaatgtatggtgatttaacggctatctggatggtcgggttaggggttgcttttacattcctttcctttgcaattgttaatgaatcggaaaaggatattgtatgaaactatatcatgtgatctactctggtgttttaggcattgacaaacaaatgttagttgatgtaatgtgtaaaaaactcgatgaacgaattggaactcgatacaaaaatcatgtatcggaaagtattttcatcaacgttgaccatccaaatgacatggaagaaatggttaatactcttgatgatcagcagatcccgtttgttgacaatttcaacatgagcgctggagtgtatacggtagtaacttttgttctaaaaaatgttgacagccgaaacgatagcgtgttgaatgtagttgcaaaaatcgattctaccaaaggaaaataatatgaaaattgtacaccgtagcatttccgaactgtctcaagccgaaaaagtgcaaattcatttcaaattcaatgatttgcgtaaaggttatgccgaaattgcccgtgaacatgggttagataacggcgatatttaccaggtagtacaggaaattgaacgtatccgcgcgttccgttctgcaaatctccctgttaaaaatgcaatgcgccgtgaagcgatcgaaatccatcgtaagcgtgtgtacaatttagaacgtgctaaacgtccgatgaagaaagaaaagaaacctcgtccgtttaaacgtgaacatcttaacacctctatggcgctggcgtttcaagatgcggggattatctaatgcgtaaatctgcgatggatcgttgggctagtattgctacttcaaacgtaaaaccaaatcaagccgcgcctgatgtagaagcggttcgtaaagcaaaagaacctgagatcgtggcccttagccctgaactcatcgagcatcgccgtcgtgcgtctgctattgaactggatctgcgtattgcgcgttcatataatctcaagcatgaacacgccgcaaagaacaaccattcttttgaccttactctggaagattggaaagtgttgatgacaactgaacgttgtcagtattccggcaagatgtttagcaataaaccaggtagcccatatgcccgtacaatggaacgtattaatccacgtctgggatatacacaagaaaatacaatagcggttatcaacgccgctaatgccgaaaaatcacagcttgatgcattcgttaagggtgatgtcattctggatgaagtaaaagtgaagttgctgcgtaaagcactttatcaagtcgaaaaacgtgtgaaaatgaaaggttaaattatgtttaagaaatattcttctctgactaaccattatgaaggtaagttcatcaatggtgtaattatgaacgggcttactggcggtgtgtgggttgcacgtgaaaagatccacggtgctaactttagctttatcaccgatgacggtattaccgttacccccgcaaagcgtactgatgttgttaagccagccgaagatttttatggctgttcagcagtagttgcaaagtattccccagggatccgtaagatgtgggaaaccctcaaaaagaccggaacttatgatgatttggttattcaagtctacggtgaatttgcggggcgtggtgtacagaaagatgttgattacggcgaaaaagatttctacgtattcgatatccgcgtaaatggtgaattccttccggataacctgtgttcgctgatctctcgatctcatggcctgaaaatggccccgctgttgggatacggtacttttgaagagatcaaagaactgccgatcacgtttgaatctgttgtgaacaaagcaaatagcggcattggtagcgataatacagtatatggtgaattcgtatatcctatcatggacgttgaagagggcaacattgcagaaggttttgtaatgaaacctgtttcacctgcttttatgccaaacggtgaacgcgttgcaatcaaatgcaaaacaaccaaattcactgagaagaaagcgaagaaagcaacccgctttaatgctccggtttcactgtcagaaaaagacaaaaaccaactcgatgagtttgtttgttaccttacagagaaccgtgtgaaaaacgttctttcgaaactggatctggcttcgatcactgcgaaagatttcggtcgcattatgggcttaacggttcaggatgctatcgaagaaatcagccgtaatcatgggcctttcctcgaacagttcgaagacccagcaatggctaaaaagttgtttgtaaccgaagcccaaaatatgattcgccctgtatggggcaaaatcctgaaccatgaattttaaactatgaacagtcacggaaactatagaagtatttctgatgaaatagccgcaataagagaactccttcaatacgtttcagttgatattacttctggaaatatcgtatggtcttctccgcgtcaaggtaggagggttggtgattccgctggtactatgaaagatggatattgtgttataaagtttcaaaagaaacaatatcgcagacatcggatcatcttttatgttgctaatgggtatcttcccgctcttgttgaccataagaatggtgttgaatttggtgatggtatagataatttgcaagaggcaacgcaacaagagaacataagaaagcagataaagaaacgaagcaatgcttctggaaaaagaggggttatttttgataaaagaagaaataactatcaagcgcgaatagttgttgatggtaagcagatttttctaggttcatatgataaccctgaaaaggcttatgaagtttacaacgaaaaagcaaaagaattgttcggtaatttttatgtcgaatgattttagtacagtaattaaaactgccaagacagtaacattaattggcagtcgtaaacctcctgaacgtatcgcaaacattgctgttaaaatcggacgtgctttgaacgaaagcgggatcagggcttattctggcggcgctcctggtatggatagtcactttctgtttgactatagtccggataacagatgtataatccttcctgagaacgggtttaacggccttttctcaaacggaaaggatatcatcgactttcgagatttaaacacacagaaagccgctgacgaagccagaaaggtagcaggtaacttcgatacacagaatgaatacgttcaaagaaggtatgcgcgaaacacgattcaagttcttcgtgaaaatcttgacaatccaactgattttgttttattttgggcggaagaacgtgaaggatgtgttaaaggtggaaccgcgatcgctgtaagattggctaggttgtacagggttccatgtttcaatctcttcaaagaaagtgtattgaacgatgtgtgtgatacgttagggatcaatatcaaacccccaacgttggattttttatggtaattgaacatgcgcccttacttcgtgaaacatacgaaagatgggctgttaataacgcaataggtgaaaatatgattcatgtacgtagtatcggtactgacggcgaaactccggtagaaggccgatcccccactctcgcagaacgagcaagagaaattatcaacgatcagaatgctaagatgatcgaacatgcgcgggatacaatcacaaaaggtgttctgaaacacgcgacacaacaaaaccttatctatgatatgaagcacgatatcggctcttgtctgggtattgaatgtactcgctatgcattccaacgagtttctgaatggttggaagaagaagggctaaaattcgatacagaagaaaaacgcaacgccgctaagatcacaaattctctggctagtaagtacaatcaaacgtatagaaaccaggaagaacgtgaagtgttcggtttcaaaattcctgaaaggaaaacagatcgccgtgtaagtgaattcactttttacattagttggtaaaaaggtgttgacgggggttggttatagtagtattctaactcccgtagacaagacactaactcagaaggataaacatcatggaaatcgtaatgaaagcaacttatgctggatactgcctggaagcaaaaggtgttgctaacaatggtaaaggcttacgggccaatgttgaagcaatgctggatgaattacatgcaatgtacgaatatgacaacgtagcgggtagtgttcttatccaagcgttggaagtcgatggtgttgattgtgctggttggtgggatgcttacattgactacaacgataaccgggtttacctgttgagcaacaaagattatttctaaggaaccattatgagcgatgaagctgaggctttagaagattgggctgattttgatgacgaagaagacggtgaatatttctgcgttaatcgtggtgcttataaagaccgtttagaactccgtaaacttttatcgggttcctctcaaatatcaggatccaaacgaaaaagtagtaaacaaaaagttcagtatagtgatggttctgtacgtgatgaaactgttgttgctgaattccgtggtcgggttatcacaaaagaacgacaaattgatgtaaagaacttgtatgaagtggctaaggctgctaaaacaggttctgtgattgtttgccctgtgtgcaaagaaaaacacacaaagacaacgtatcacaaagttttctgttcgaatggcagaaaaaccagtaaggattgtaagtctaaatatcacaatacaatctatcccgaacgactggatcgggtattttaaaataaacttaaaacgtggagtacgtttatgaacaacaaaactttcgaagaactgaacagcatcatcacttccgtagattcctataaggtttctcactggtcgcaatatccaactggctccgaagaggcgctgttttatattgaatctcgtggtggtaaatttgatcaagtagttacggctggctgtaaccgccttgcgcaaatcctatcacgtccggtgactatggaaaacgtagattttgctaatcggttgtacaaaatgcactttgggcgcgaaatcttcaactacaaaggttggaaagaaattgcagaactgggttacatccctcttgaattcagagcgattccggaaggaaccccagtagcggttaaaaatccggttgcaactttccatgctgggaaaaatgcgctgtggttagcaggacacgtagaaaccctggcgatcaggggagtatggtttccttcaaccgtagcaactctatcccgcgaatgtaaaaaagtgttgaagaaatatctcaagaaaacctccgatctcgaaggtgaagcatttgatatggtattacgtacccgtttgcatgacttcggcgcacgtggaacctcttctgctgaatctgctggtattggtggcctcgcgcacctgtataacttcctcggtactgataccgtagaagcgctgattatggctatctctctgtttgaagattgtcagaaagcgtttgatgatggtgaaatggcggctggtatttcaattcctgctcgcgaacattccactaccgtttcttacggcaaagaaaacgaagaccttgcgtacaaaaacagtattgagatcttcggagaagggatgtatgcatgtgtgtatgattcctgggattttaaagcggcggttcgccgtatcgcagaatataaagattctattctttctaagggcggtactctggtagttcgtccggattctggtgatatggtagacaatatcatgtacgctcttgaagaactgggccgtatctttggctatacagtgaactcaaaagggtataaagtactacacccagcagtaaggatcattcaaggtgatgaaattcatggccctgaaacaatcaatcgggtgttgaactggatggagtctaaccgttgggcgtctgaaaacatcgcgtttggtatgggcggcggattgcttcaagaagttacccgcgacactcaaaaatatgcgatgaaaatgtgcgcaatcaaaattaacggtgtgtggactggtgtgtataaatgtccaaaaggcgctgaatggaaaaagagtaaaaaagggttgttgatgactatcactgatggtgttaactttaaaaccattgatactctggaacagaaagtgccggaaggctggaaagatgctatgatcacatactatgtcaacggaaagattacttcccgtgacactttagaggaaattaggaaccgtgccgggatttagtatccgcaaaaacgacaaaggaaccgtgattttctatgacaacatgccccttgtagctcgcaaggggctttttgctaaaatcgctgggtattcctttaaactggaagaagtcaacgacgaaacactaaaagagatcgtaagaattgccttacagttaagaggtaagaaagacgaacaaagagctattgacatgatcaataaattgggcgaaactcaatgcttcatagtgaatcgtggttacaagtacgataccattgcaaaatttgaaaaagggctttgtgaattatgagttattatggtgtgatcccatacacaggaaacaagcaaaagctacttcctgaattgttcaaattatttccggacagaaacagctatatgcgattcattgactgtttttgtggtggtttgagtgtgtccctaaacgtccctaaacccgttctaagcaacgattacgatcggacgttgattgatatgtataagcgccttcaaatgcttcctgacctctctccggtgcgagaattgattaaacaacatgggctgggtaagaacgagaaagaagcgtatctcgcatttcgtgatgcatataataagaacaaggatccgctatggctctatgttctgatcctgcattcgtttagtaatgttaatcgaaccaacgataaaggcaattttaacgccaattttggttgtagaacgttgaatgattctaccgttaaacggtttgaacacttcaaaaacaatgttcggggaattgaattctctagcgcatcgtttaaggatcttgatatctgtttgaatgattttgtgtactgcgatccgccgtacctgatcactgatgcagtttataacaagttctggaacgaagaacgcgagcatgaattatatgattttctcgataatttaaactctgatggtatcaagtttggtttatcaaacgtgacacatcatgcaggaaagcaaaatgatatcctgatcgagtggatgcaaaaatataatgtgcataacctcgataaaaagtatctgttaggccagcatactgattcttacgaacaaaataaaacgcaagaagtctacgtgtgcaactaccagaaacgcgacgtaaatacataccctgaaacactggatgacttaatgtaaggtaacatatgtttaagatttttggttatatcccttctgtttacaattgcgctccatgcctgaattctaaacgtctcctggacgcaaaacgaaaagaatatgagtttgtttctgtagccgatgaaaaagacgcagacggcaaaccgatcctgaatgaaacggtcatttctgaactcgaaagcctgttaggtactcgtagactgaccatgcctcaaattttccacgatggtaagcacatcggcggctttgaccaactgcgtgagtacgttcgcacgttgggataaatattaacacctttatttgattggtgttattatgctcactaaacgtattactaagaaagattatccatccattaaacaagctctttttgaacagcaaaacggcttgtgcgcgttatgtggtcgccctttagagggtggccttgaaaaacatcaccttgaccatgatcatgctctatctggctctaatgccggacgtgtgcgcggcctcctatgtaacctatgcaacggtacagaaggtattgtaaagcacaaatttaatcgttctggtctggtttcccgtgatgttgattacatcgaatggctagaaagcctggtagcatacctcaaacgcgattattcacaaaaccgtatgcacgacaaatttatacccgataaggttaaatggtttacacgcctgactaaatcggatatgatagccgaaatgatttctatgggctttgagtactcagaaactgaggatcgcaaggctttagcaaagagctatagaagacaattaatgaaggcaaccaaatgaaatatctaaacgctcgattatcaacgaaacagaagaaaaagctgatgatgttgatatccgccactgacaaaaataccatatctctgcatgattggatgcttggaatgggtgaatctgatttgtgttatgtcaaaccaaaagacagaccgatgtttgatgatcgcggttgcacattgactgctttttcttctatccccgttattgatatttggaaactccttgagattgtaggacgggatatacccgttgatggagttgaactaatcaaatatcttaacgaaatcggacataatttagatattatccataaggcaacgaaatgaatgtagaaaaacgagacggaacaatcgtcgaattcgataaagaaaaaattcgtaacgcagtttataaagctggcggtacaatgacggatgaagacagcgcaattatgcttgtattgcatagtcagatccgcaatggtaaaccaatgaagatttcacaaattcaagaacttgttgaagaatctttgatgaagacaaatccgactgttgcccgtgcatatatcgaatatcgtcatgatcgtgatatcgcccgtgaacaaaacggaaaattattccgtgatatcaagggtttgatgactcttagtaacaaagaattaaccaacgaaaacgcaaacaaagattctcgcgtattcccgactaaacgcgatcttctggcgggtatcgtttctaaacatatggcgcgtaaccatattctaccgaaacatattgtagaggcgcatgattccggtgatattcattatcacgatctggattacagcccgttcaccccatacactaactgctgtcttgttgacctgaaaggcatgttagaaaatgggttccggatgggtaacgctgatatcgaaccgcctaaatcaatcggtgttgctactgctcttatggctcagatcaccgcacagattgcttctcaccagtacggcgggacaacctttgcaaatgtcgatcaggtgctggccccttacgttgaaatgacgtacaacaaacactttaaagatgctgtttggtacggggttcctaaatcaaaacagtatgcgatggaaaaaacagaaaaggatgtattcgatgcgttccagtcatacgaatatgaagtaaacaccttacatactgcaaatggacagacgccttttgtcacaatcactttcggtatgggtactggttggcgcgaacgcatgatccagaaagcgattctgaaaaaccgtattcgtggactgggtaaaaaaggcattacccctgtattcccaaaactggttatgtttatggaaaaagggattaaccttaatccggaagacagaaactatgatattaagaaattggccctggaatgtgcttcaaagcgtatgtatccggatattattagcgcggctaataaccgtcgtattactggctctagcattcctgtatctcctatgggttgtcgtagtttccttagcgtgtggaatgatgagcacggtaatgaaattcttgatggacgtaataacctgggcgttgtgacaatcaaccttcctcgtattgcgattgaagccgaagcacaggaagatgaagacgcgcatgatgcattttggcgtatccttgatgaacgtctggaactgtgctttgaagccctgatgactcgtatcgatagcctacgcggtgttaaagccagtgtagccccgatcctttatacagaaggtgcgtttggtgtaaggttgaaacccgatgatgaaattctggaactgttcaaaaatggacgcagttctatcagtctgggatacatcggattgcatgaaactctgatgcttttcggatctggacaacacccattcgaccggatcggttctcagaacatgggtagactgattctggaatatctacgcgctgcgaccgaagcatggaaaaagaaaaccggatttgggtttagtctgtactcaacccctgctgaatctctatgtcatcgtttctgcaaactggactatgagaaattcggaagtatcaaagggatcacagataaaggctggtacactaacagttttcatctggacgttgaccgcaaggtaacaccgttcgagaaaatcgactatgaagccgattttcattacattgcaactgctggacatatcagctatgtagaattccctgatatgaaaaacaacctagaagcccttgaaaaagtatgggattatgcaatggataaactggactacttcggaactaaccttccggttgataaatgttttgaatgtggctcggatgatgaatttaagccaacagaagacggttttcattgtacccattgtgggaaccatgatccggaaaaaatgagcgtcacgcgccgtacatgcggctatttgggtgctcctgctgtccgtgggttcaacgaaggtaagaacaaagaaatgatgcatcgcactaagcatcaaaattaatcaaaaagcccttgacttcggttgagggcttttgttatattgggcctatcgaaaaggagacatattatgaaactgactaagaaaatgaccgatgtagtggcatgtgcgtttgcattaggctacaaagttgaaaatcatccaactcgcgttgaagtcatcaaccctatcaagggccgtcctggtttggttctgtgtgaagacggcacagcatatcgtaatgatgtctctttagaactggcaactactatccgcaccgcaaaacaaatgaaagatgttctcattagcggcgcaaaattgagggctttatgatgtattggacaaaagataaatttgtttttcgtgatgatacgtgctttgggactgcataccgaaacttggctattcgtggcggttcgttttcggctaatgatttgtctaaggtagtatttcctattaaagttactgagtatgacgtattcggtgttaaaggatttactgattactttggtacaaagtttgaatcagaatcttacatttttactaatagcgatcgtgaattattcaaaaaacacgttgttgttaaagagaaaccgttattaccaaaagaggatgaagcaaaggaaatctatgatctcctgaacatgcttgacaatctcggtacttgtcatctgttcggtaaacgcgcccgtaaagcgaaagatgttctcaacttgttgcgctctcgccggaattacctgatccgggaagctgaacgcaatctgaaaaattcagaaaaacaggctgaaatccataaatccacccttgctaaattaaaggctttgtgatgtttccgttatacgctaaagtgcgtcgaaatgtcgggaattcatatcaggaatggagtgaatggctacgtgaaacaaagtcattctacatttcaaaagcaactgatatgaaaggccgtaacattcgctatcgtaaacccagtggtaaacgagtgaatgggatagattacattgttcttgattcgattcgggatgatatacgataatttaactttgaggcaatattatgattttcaacaaaacaaattcacgtaatttgaactatctacgctgtgaactggaagctaacgaaattgaactgtttttctgtggggctacagatccggaacacaaattgcattgggtatcaggtgagattgtaagcctaaccgaccagattgttgaagaggctacccgtcgcgatgcaatagttaaaattggtgctgttgatgtgaactacgaagggcatccttcatttttcattcaatattatccataaaagtattgacctgtatatctgaatgtagtaacatccttcttgtcaactaaggaggatgttatgaaaatcaaaaacactgctactgaaactctttgcaacgaaattgcagaaatgtactggagtaaaggtcacttagaggctatgaaagagtttcaaaagtggtgtgatacccaaaagttagctaaatgggaatacatcgttattgttgaacggatcaaagaactgatcctcgtgaagaaaggtaacatgaaatgattcaactgaaattagacacaaatgcggtgttaagcctgtttccggaaggttcaaccgcccgcgtagatctccaatctgctatcatcaaaaacgtggtgaataacgtagttggtaagcgtgttagcgaagaaatcaacaaacggatccaggaacagttagctgttctaatgccgaactcatccgaaattacacagatcatcaaatctgaattctcggattacgtcgaaaaacgttatgggtattccaatgtttttgatgtcaactatggcaatgttcgcgaactgtctggtaaaatcaaagaatcggtaaaacagcaatgccaaaccattcttaaagatatcgagaaagaggcgattgctcatgcaacagaaaacattattgcagacgaagccgcgtttatcgctcgcgtctcgaataacctggaagttactgtacgcaaagcagtaatgcaacgggttaacactcagttcccagacattattgacgaagcgatcagagaacgtctgtttggtgaaaaagcatgaattacgaccgcatctataatatggatgtggtcaacggaaaagggatccgtgttgttttgtttgtgactggatgcaatcataaatgcgaaggttgttataacaaatcgacgtggaatccttgcaacggaacaccgtacacggaagagacagaaaaccatctgatttctctgttgagtaatccgcatgttgatggacttacattaactggcggcgatccgctttaccgtgacaactatcctactatcctaaaactgcttgagcgcgtttctaaggaacttccaaagaaaaacgtatggttatggacaggatataccctggaggctttacaggccgacccagaacgttctaagctacttccttacattgatgttctgattgatggtaagtatgaaaaagatttaccaactaaaaagccgtttcgcggttcagataatcaacgtatgatcgaattcgctaaaaaatcgatagaaattaaaaatatttcttgacctaatgtgtaactatggtaatcttaccacatcgtaaatgacgattaactttaattgagagataatatcatgatcctgaatttcaaaacccgtaaagaagcgcgtaactactgctggaagtggaacattcccctgaaaaccatccgtaatacagggcgcggttcttgcccgtggacagttcaagcaaatgaactgaaaacgttcgtagttggtaaaacttacaaactggttgaccgtgaagggtttactaccaattcacacggcggatctaacaccgcaaacactatccaggcgagacagatcgaaaaattcctgaataacgaggtaaaaattatctcgaaaaccaattcagatactttcaaaattgagcatactccggaaatgacttttagctctctgcgttcgtgggaagctcgttatttcgtcgaagttggcgcggctccggttaagaaaacgaaagctaaaccgaaaaaagccaacgttacggctccggttgcgcctgttgcaccagcaaccgcagatcttgatcaaatgcttgatggcggttcggcaatgtcggttgaactggatccgactaaatttgttgaaggccgttcgtatgttctggttaaaccgcagcaatttaaaaatcgttgtggcgctaaccacgggatcaaatcatataccgatgaacacagtaatggtgtatacaccgtttaccatacgacttcgctcggtcatcatcaattgagcaaaacggtagaaaccattgattcccagaccggaaacggaaacgttggttactatctgcttgattctgaacgttcgttcttccgtgaactggcgaccggaactgttgatgaacctgttagcgtttccggtaatagcgctatcgctatcaatgtagacgaagcagctaagaaagaagaaatcgcaaaagcaatgacacagcttgaagaagcggttaaagcccatgatgacgcgcttcaaaatctgcgtactgcttccgacctggttcgcaaagctgctcgaaaagtagcagaagtaagcaagtaaattaaactgggtgctccggcacccttttttatgaggtgacacatggaattattagaaggtaaatcttataccctgaacatcgacgctaaagaatttgcagaaaaaacctggcgaaatgctttagctgaattgatcaaaaacaacggctatattacaatcgatcgtattgcgattggggatactgaggacattgcttatgttctgcaagatgatttcgaatatgagatccctagccatatctggaaatacttcaaaccatatgatttaccggaagaagaaccgaagattgctactaaagaagaaatcgccgcgcctgatttaaatttcgtatcttccgatcctaaaatgtggatgactgtaaaacctgttcaacaagatatcaatgatctgcgatttgattatccttttgtcaagcggatcacttcgatttctgtactaccagcgccgactgattcacaggcacttgaatttgcattacagcatgttttcggtgataataagctgtacgcgattgacaaggaagctgctattgatgaacagaaaaaggaaatcatcaaccttctttctctgcatcaacaacttgaagcggtggaattgattgagcgtatgctttctgatacaaagaaagatatcattagcaaaatcactccggcacgaaggaaagcaattgatgaaaatcgagatttacggtattcccgaatcgcttcataaatgttacggctgtattgaagctcggaaattacttgatgagcatggattagaatacgaattttattctgttctaaagccagcaaataacagtgtggggtttgattacgatcgaccccgcattgaagagttagcgaaacgtgttcgtagtcgaagcatggcatttacttaccctcggatctttgtagatggtaattttattggcggttatatgcaattgaaagagtatttgggtgaagcatgaataaagaatacattcgcaaagtagcaaacgctattcacgcaacaacgattgattttctggaagggtttgatcatattatccaccctgaaacgctggatagttgggaagccaaactgtttaaaagtatcaatgaacagtttccggaaaaggttaagcgctggtttatcagacaggaaatcgtagcaacgatccttaatgaacgtggtgttgaggcgttcggtgtaacccctctatataaacgaaaccagattacagacgaaacaatcaagaaatataaaaagatggttcggaagtaataaataatcagttaaatggccttcgggccattttttgtatataaatattggtattgaatacaatataggaaaaaagataatggtagctaaatcattccgcgcacgaagtggccttgatgctgctggtgaaaaagttatcaacgttgggaaggctgatcgtaatacgctgagtgacggcgttaacgttgactttttcaatgaatttaacggaatccagcagtatgacccgactcgtggttattctcaagacatggcgatcatttatgcgcgtcgtatctggtacgcaaaacagaatattgcttcccctgctggggctttcgacgaatccaaatggatcgcaactcgtaatgacccgaaatgggtttatagtaacgtaaccactccagacggtagcattattgaatctggtagttacattatggctgatggacgctttactgaacttctgtacctgctgccggacaacccgacagagggcgacgtaatcacgtttaaagattgtggtggtttagtaggtgtgaacagtatccttgttaagtctaacacccgtcagatccgtttacgtactgtacaatcggcacagtatcgactgacccacccgtacatgatcgcaacgtttatctataacggtaacgtatggcgtgttgctgaaactctggataaccgcgattctgagatcgtgaacgtaaccggaacaggttcattccagttacaatctggtatgacagttttccgtaacagtgctacgggtaaaatcactctccagttgccgaaatatgcaaatgatggtgatgtgatcacaacctatgacgctgataaaatgaactctatcaacgtagccgttttgcagatttatccaggtagtggacacactatttctgacggtgcaattactggtgttacttcggtaactagccagaaatctggctttggtatgttcatctttgatgcacagaatagccaatggaaagtatatgatgctgataatcgtgttcgtctgcgtcgtatctatagtgatttaaacacagttcctaacgattacgtttttgttactgcaaacccttctgggactataccaaacgttacagttacccttccaactgatgttgctgatggtgatcgcgtttacgtatccctttatatgatgggtaaaaaccagaactgtacaatcaaagttaaagatggtacaacggacaagatccgcaccaacaaaaatatgatgcagttcccgcagcgcaaagactatccgcctgatgattggtttagtgtaacttcattagcatttaatgctgctagtgattacctcccgtatatcgagttttcttacatgaaagctacgaaagaatgggttgttgctaattatcgtccgatcgttgaacgtgttgacgcaactaacagatcgcgtactggtgttattgctctggctgcacaggcagaagtaaacaaaaacttggaagacaacccgaacgacgaaactgctattactccgatgacgttagcaaataaaactgctacagaaacccgtcgtggtattgcacggttagcaacaactgctgaggttaacaaactttcaaccgatacctatctggatgatgtgattgttacccctaagaagctgaacgaaagaacagcaactgaaacccgtcgtggactggcagaaatcgcaactcaggcagaaaccaacggaagcaccgatgatattactattgtaaccccgaaaaagttgcataaccgtattgcatcgccgaccttgactggtatccttgcccttgttgctactggtggtgctcctaacaccaacacggatcgttctcaggctggtactggggtttatgaccattcagattatcagaaagcggtaacgcctaaaactcttcgtgagtataaagcgactcagttacaatctggtgttgtatggctggcttctgaaaccgaagttattaacggtactgttgcaagttcaaacgttccgaccgttgttactccggaaatgctgcacaagaaaacctctactgatggtcgtattggtttgatcgagattgctacccagacagaaaccaacgcagggactgattacacgcgagcggtaacgcctaaaacgcttaatgatcgtgctgcaacggaaacgctgacaggtatcattgcaattgcaaccactgccgaagtatcagcaggtactgtaacgaataaagcgatcgtaccgtctaaactgaaaggttatctggacgatacaagccatattactgttgctactgctgatgggttaactcaatctggtactatttggactacggttaacatcggtattcaatcagcaactgaaactcaacgtggtactttacgcgttgctacgcagtctgagacgaacgcagggacattagatacagtatttgtcacccctaagaagttacacgctaagaaagcgactgagagcgcagaaggtatcattcaggtggctacggctgctgaaactaccgctggcaccgttgcaaacaaggctgtttctcctaataacttgaaaaatacaattcaggttgatacttcatggcaagctaccgatctggtacgtggtactgtgaagctgtctaaggggcttggtacttggtctggtaatgatgtggctggttctactcttccggatgatggttatgccgctgtaggtgttgctgtttctccgtatgaactgaacttaacactgaaacactatctaccgatcggtgctaaagcggttgatgctgataagctggataatctggattcttcccagttcattcgtcgtgatattgatcagacggttaacggggcattgactctaacgaaagaaaccactgtacaggctaacattaactcaaccgccgacgcgagtttccgggtaatgaatgttagtggagatctgaacgttggtgatggctcatcgatgggtaaacttcgtttgaatggcggttcatctaacgactggtcaattcaagcaagttcatcctctgggcgtattgcaatgatctcaacgggtaacactggcacagttcatctttctgtgtataatgatactcgcggcgttgtagctaacgttaaattccaggctcctgaaattcaggcgattggcaaagtgactctgggtaatgatacagtgatcacggctgctggttctgttctctctatgggtacgaacaacaagacaactaagatcctaacttcggacgctggtaacattttggcagaagaatcagggaactcttataaagtctttactgagaagaacgcgcaaaccttgctgaatcctacgtatgtacgtaaagcaggtgatacgatgtctgggcgcttgacggtaagcaacagttcaattatcattgcaggtcaagaggcttggtcaacgctggatgcagtaacagaagcatccaggggcaactggacggctgagatcacagcatcggcacaatacaacttgcttcctggttatgcggttccggttcttgaaccagatccgattaatccagaaatcatgattgtgacccgttatacctatgttaaagcaccgggtactttaacgcagtttggtaacggaactgcattcacttatcagatttgggcacctcgtccgacctctggtactggtgttaatgcgctggcgcaatccttctggatccgtcaaatgaacccaattacgggtaaatttgatggttggggccgcatgtatactagcaacaacccgcctactgctggtgagattggtgcaacgtctgctgttggtactacggttaaaaacatgactgttaccgattggatcaaagttggtaatgttaagatttacccagatccggttactcagacagttaaatttgagtgggtggcataatgtcaaacttaatggcggggttcggccccgattttgtagaaacgcaaattctatcggaaacaaacagcgtaacttacagaataaccgcaaaggcaacacatcccaatgcggttcctaatcagtatgagtttacactaaatcaaaaggcggtagggacaccgcctagtgttgggatcaacgtatggagaattaacaatgctgtagttgatccaattaaaaccttcacattatcgaatgataattcagcaactgcaaacaaagcgtttgttgaatatatggatgctcaaccttctgggctgtatttgataatgactaacggtgaatacaaaacaagccaaatcgttgatgattggtttgctaaaaacagatccgttatgtggcaaggcgctgatttcgctcagagattcccaaattctgcatatgttgcattgtatggggcttcaaaatctcgtatactgattgaatcgttttacgcgaacgatggagttttaaaagaagattcacgcgcatcaatcgatcttgtctatgataacgttggtgatgttgggcgaactggtgtacctttccgatctgttgaagatacggaagaatacaattcaaccaatgggtctgaatataaagtatatcctgttgcaaacccagtgatctctaaactggctgattatggtatggctcctggattagctatgatgattgctggtgatttttacgccagcaaagcattattggatgctggatcaacaacaagggttactgttcgatggtttacgggtactgctcaaacttcatcatcggtgattgaagttcctgcaaataaacctgatgagtggttacgatttgaacagttctatacgatccctagtggttgtgatggatttaacgttgctgtatctcgttatcctaaacccgctacggatagtttatctgcgatccgtaactttgtgatggttcaggtatctgctgccgaagctgatcaaaactttgctgcacagtttggggttaacggtatcagaatgaacaacatgatcgatggcggaacaccgtatatatttgaattgcctaatactaaggtttatccaggtggtgattattctgcttccgaattccgtgaagttgatgcataaacaaaggcccggaacatcgggccttataaatatgtaaaaaggggttattatggcagatttaaaagctggttctacagtcgggggtttacctatttggcactccggcacatttccgctggttccggttggtaatactctaacctatcgcggatataaggtttatactgaaaacgataaaccgcaagcatcaaataacgacttcgtttctaaagcaagcggtggtcaatatttgggtgtagttgcctttaaacaggggctaaaaattaacgctactttcacaggcggaagtgaccagaacggtttatattctggtgatggtgatggcgcgacattatcaaaagccaacattgatcttgtatcatggtatggtattggtattcgttcatcttccggtactaatggtcgcgtattagtcatcaacgctcgaaatggtgatttaaacactcagggtaatattacggttgaaaagcaaatcagtattacaaccgctaaccctactgacgcaagtcatgcaacacgaaaaagttatgttgatggacagataaataatgtcacaacaaatgctaatagcagggtattacgcgctggcgatacaatgacagggctattaactgccccgcaattcgcgagcacaggcgcggcttcccgtcccgaacacgtaccacggctcgaccaggtaattactaaagggactatcatagattttggatcttattaaggtgaaacatggctgatttagaaaaaattcaattcctacgtagcacagttgcggggaaaacacctactacaagtcagcttgcagatggtgaactggcgatcaacatggctgattatgccatttacacgaaaaatggttcttcgatcgttcagttagcgggtaaaggtatcccagaaacaaataccaaaaaattaacagttgatgggcctagtgctcttaatgataccgttaccgtagcggaaggtaaaactattactttcaccaacgagaatttaagtggtgaaataactcgtcatatcgtcggtaaatgtgccagcaatgatggatggtacatcggttccggtggtacaagcaataacggcattcttgaaatcggtactattgacgatggtactgaaacaatccagtttgtacaacgcggtgctggtaacgtagaagccagaaaattagtcttacttgatagctctggtaatactactcttcctggggatttaagattatccactaataaaaccgttaaaattaacaacggaagctctcttgtccttgaaatgggtgtaggctctaacgatgcctatattaaaaaccaaagaggcgtaggtgttcttcaattaactaatgatagtaacctgacgttcagaaattcccaggtttattatgctatgagtggaagaggccctggtaaagatggtactcttctgactaatgtagaaaacgagcgccaacttaagcaagataatttccctatatctacaggcaccgaagctcggtggactaaagttgctcttttaaaagatcgtggatcaagccagagtcgcctgcaactgatggtgactaacggcggtaactatggttctacgcgtggatctatcgactttatcgattgtagcgctagaaactttccatccactttaacaagcgctaatattcgtaatcatctacaggttcgtcgaatcggtgatcctggaattgataacactaaccaaatgcgttatagtctggttcgtacctctgagggtttagaactgtggtttactcaacgcgcattcattagtagtgttaaagttgctctgctgtctattgctggtgatactgagtattatctgcctactggttacacaacttctgcaactgctccggaaggtttagttgagagtgtggctattcgtatctatgacgaaattaataaacctaaccttgacaatggtactgatggtattctgtctattgctaaaggtggtacaggcgcaagtacagcggatgctgctcgtacaaacttagggttgggtactgctgcaacccgcgatgtcggcgaaggtgctggtaatgttttagaaaatggcgcttatggcttaggcggtaatggtggtaaatccatcaacgacattatctctaatgcggatatgttgacccgcttaaaatcatacggcggtactttctggcgtggtgttgctaaatctggtgttagcgttcaaaatggtctttatagtcatggctctggtatttttatgaatgctggtgataccatgtcagccattaatatcgactatggtagtgctaaagttcgtgtatacgcggctaacaacgcggctcttgccgcaggagatgtcaaatacaacgaactttacggtacagcaaataaaccgtctaaggccgacgtagggcttggtaatctgacaaacgacattcaggttaaaaaagctggcgacaccatgactggtgatttagctgcacctaacctccatgcttctgggccgggaaccgcatcggtgtatgttaatgcaggaagcggaaatgctcatgtatggtttagaacaaacgccaatgaacgcggtgtaatttgggcaaatccaaatactacgaacttaggacaaattaacattcgtgcaaaaactactgaaggtgtttctgctggtgattttagcttccgttctgatggctgccttgatgttcctgtagcagttaaagttggtggagcagcaatactaaccaaagacgggaatattacctctggctcgatgtttggtggcaaccttaataactatctgaacaccattaaaaatgatatcactgctggcgataataagcaagtaagtaagactggtgacaccatgaccggtaacttaactattaacgctaacttaaaagtcgaaaaccctaatggatcaatggttgatttaggttcagagaactcagataagtacagcagattaacccttgctcgtaaagttggcgatggcgctgccgtagcaatgcttaaaattactcctgaaggatacgtgcaatttggttatcaaactgcggtttctaatccagctcctagtaaatatattctagttaaatctagcggccttgaggtagaaggggacttggtttttaaccagacatatcgtggtgctgaagacgcagttgatattactgataagactaatgaccttaacaacatggttattaaaggcagtgatttaggtactcgtctattatacaagtgtacttctactggtggtggttctaatatatcgaacaaacctacctctgacggcaactttgttcttgaagttctatctttgcgtaaaatttctgataccgattggacatgtaagcagacctttactacaaagaacggtgatgttgaaggcacatatgttcgatactgccaaaacggtacatggtctgcatggaaagaggttgttgctggtgttcaaccaattaatttaggtggtactggagcaacttctgtagctgctgctcgtaataacctcggtgttggtgaaggacagagcgttaagttcggcggattagttgttgatggaaacatcaacgttgcttctggtaattttgttattgcaggccaagctcctactgataactcgcatctgaccaacaagaaatatgttgatgataaggttgcttctgctattagtaatgctggcgacacgtatcttccgttagcaggtggtactgtaactgggcggttaacaattacaggcgatcagttaaagactacatcgctctgggttactggagatgctgctgttaacggtgttttaactgttgatggaagggctagatttaatcaagagttcattgtatcaacttcggttaacgtccagaacactggtaacagtcatttggtcttccgtaaagctgatggtacagaaaaaggacttatttgggctaatgaccctggtaacgttagtataagagcaggtggtggaagtggccctacttggaacttttgggaatcaggatcttgtcaattcccaggtgctattagtaactttaatggtgttaatagtattactaattaccctggcggcggtattggcgcgtatttaaatacagcgggcctaacaagtagatttagtaatggtgcttatgtttccttatacttccaagaatatgtaggaagctatcaccaagctattcttaatgttaacggctatgggcaagataacagcttttatttccgggctggtggtgatttcatatgtacccgtaatggttcattcgataacgtcgagattcgttctgaccgtagagccaaatcggatatcaaagttattgaaaatgctttggaaaaagtagaaaaactaaccggtaatacttatgagcttcacaacacatccggtggtactactcgttctgcgggtttaatcgcgcaggaagttcaagaagttcttccggaagcagttactcaggatattgaagcagacgggggtttattgcgtctgaattacaactcagtaattgcacttctcgttgaatctgttaaagagctttctgctgaggttaaagagcttaaatctcaactgaaataatgtaaggggcttcggccccttttaggagaaataactatggcagtaacagggccgtgggtcggaagttcggcaaaggctgaaactggcgaagcatggatggtgcaagctggggccaaattaagaatagggacaccgttttggatgtctaatatgattggacaaagcgtattccatttaattttcagaattaactatgcacaaggttcttctggcgatccatctagatatagaggattctttaaaagagggttatcagtaaatataggagactcagcaaaccagccaacattaaatgcatttcctggtggtgaagtagggtctttagtagccattacaaatattaaaggggatccttattgtttgtctattttaaatggggctgatcgacgagttaaagtgtctatatttaatgcatctggcggagaccagtatgatgtttatttcagtggaactactatgagtgacggttggagaagatatagatgcgaaaacgctggtggcctcaatgggtattttgaagctagaatgtataatcagttcggtgctttattagaatatgtttgatagataaaccaacaaactcacctcatactattaaatatattaaaaggctacctatatggtagcctttttgttgcatcctaaatatacctatagtaacctaagaagagtcttataaaatggctgagagaaatcccgtagataaactagccttatttgatctggtaatatcgtttgtgatgggtgtgaaaacatggaaacaattgctgataaaaataattctaataatggttatgtttcttatggtagtaacttggtacaaatggactgatatattcccgatgataaaaggtgccattgtagtcgatacaagggctatcgaaatggaaagaacagaaaagtttaatcaatccgcgttggaacagttgagcatagttcatcttacttccaacgcggatttttcggcggtactggcattcagaccaaagaacataaactattttgttgacattgtagaatatcagggaaaattaccatcccaaatcgatcctaaaaacctcggtggttatccgatcgataaaacatccgaagaatacacgaatcatataaatggcttgtactattcatcaactacagcaagttcctacctaccgacacgtgattttgtgccagtagcttatacttttagttgcccttatttcaatcttgataactactattctggatcggttttgatggaatggtatgcaaagcggcctgatataccagatatgaagataaacatcatatgtggacaggccgcgcgcattttaggtcgagcgaggtgattaacgtaatgctggtgttaaattgtgtgatcttccaatagcccgtttgattgctttaaagaagttcatcaccgggctatttttctcgtaaatatcccaaactttcaatttgtcccacggatccggaacataatcttcattccttgccgaaacccccaacgtaaccctcctgtatccagcgctgtcgtgataatacacgaagaatggcctacctattggcgcaaccttacaacctctcttagcggctctcatagcctcatcgaacgtcatggattcccccaaaaatttctatgcatgaatggtcgaattccgatagtttcactcaaaatgaatatcggatgatctagctcatcgtggttttcttcgtcaatgacgatatcccaatcagtagccttttgttcttctaccgtggcaatgaatacctggtttacttcacacttgcggtgtgtacgtctgatgattgtatccccctcacgaaacacaatcatatcaggattggtagtgcggtacgcggttttacccgcgcacacttcattaagcatatcttcgtatgtcattataaaacctttacacgttgaacgatggtttgtttaacgtctttgtattctccgtgctctttaacggttgctttgaaagtgatttcatcaccttcgtttgcaatgttattaccgaagtaaacaacaacattaccatcaacattaattttggtcatgaatctttctacagaagtgtagtaagaaacttgagtatatcccagtgaaatcactttctcaacggttccggtcatttccagacgttgtttgatttcaccgatgtggttagctttagaaatgcgttcctggcgctcttgttcccactgttcgcggatttcttcgcgtttggcgatataatccttttccagtgcaacacccatgcagtaagcgcacacagcatcgaatacagggctgtttttgttgtcttctttagactggtcagcccaccaaagaacagtaaacattggcatttctgcaattacttcgcctttacgcttgccaatcggcatgatccctttttccagcagttccagtttttcagtatcgaacactgacagtttaccgcgacgttcgaacagatcgaaatctgcaaagccctggaatatcattttgaaagtatcagtttcagttaaacgggctgaaacacggtcgaaatactcacgcgctttcgcttccgctttctccggatcggtagataagttgcagatatagttatcagaagtataaccgccgcctctacgctcaacacgcaaggtatacattgcatttttacgaccagaagaaatgaagtaagttgtagtaactacggttgcgttagtcatggtatttctccttaaaaggtatctcgtttcgatatggctaatatagcaaaagcccccgaccgaagtcaagggctttttaatcattcattcgaatctttcattgctttatgaagatgaatatcaaaaattttccagtacgcctttccgcgaggataaatttttgctttgtcaatatcgttgttgcttccccatgtattgtttgggccacgacagcgattttttatataatccgtatgccagaataagcgttgaaccgatgattccgtacctaatggatcttctttactgaacagaatttgtatactcataagaagaacccagtgcgaacaatcagatcgattttcttttctggttcaaacggtgatttgctatcgatgtcacactgatagaacataccaacatacttttcaggaatgttggattcacgcgcccatttcaggttatcatcggtattcggccccagcatgaggttaacaacatcaacagcataatcctgttctttggtgttgccggaaccgtttacataatgcccgtgggcggttttgaggatctcaattacttcgctatcgtcagtttcgactttgtaaagcgttgtattttcaggaatttcttcaagaatgatcaaagcggttttcatcacacttacctttgtgtttctgtttacgttttgcttctttaaatgctcgcttgcgatcgcggtgagtagaagcgcggttaatccatgcatgtttcgctaccaaattattcatataagccccttaaagaaaaatatttaggggctttcgcccctgtatcaatccagcagtttgcggatcttgtctgcgatacgtccggcacgggttgcgcttgcagtatgatcgctttcttttgaagccagttccgccagcttacgctgatgttcttcttctgctgcttggcgatctgctgcaacctgtgcaacctgctcattatcgtgagcaatacgcgcttccagttcagacagggttttgtcgaaagttgctacgatttcatctacagaacgaattttattaaacagtttcataatttatctcaattggttagttttaatcagtatacatcaatacggctggaattcaaaatcataaatgtcattcagtgcgcggttccactcggtgtagttttcaccagcaccataacgcatttgaatagcactttcgaacgttgatccgttgaggttcgggaaaccgaacaggtttttgattttgtcatgtgctacataatacagagaagcactttccagcatcgcaaccatcgcagacggttcgtgttcgcggcgcttgatacgtaacagagtacgactagcaccagttttacggcgttgatttggtgctacgtagaaacggaatactacgcgccctgttttatcatcaactaccaggtaaaacccgttttctttcagatccacgccttcgaatttcttgaaggttccgcgtttcatgtcaccaattttaattgcatatttgtgaatgtcaagtcttgtcagaattcttttcatattttttagataccagtttgcctaattttgtaatttcgcctgtttttacgttaacaaacaaggcgatgctcagaaatgggatgctaatcactacgctgatcaatgtaaacagaaaacgtatcacaaaaagaacagcacgttcaagatatcgttgcatccacgcgattcctaaacaactataccctactataaaggtggttgcaacataaaatgcaccaaatcctttacgaaatacgtaacctttcccggattctatccggtcgtcggcccacatttcacgggcagttttcagaatagattcaccactagcgcgagtttcgttagccgaaggcatgtttttaaatttcatgatagtctcctatgcgcccagaactctccaggcgcggttgtttag

SEQ ID NO: 56 - DNA, 112865 bp, unidentified
  source 1..112865: mol_type = genomic DNA
ttatgatgcgatggctaacgattgaatgaattgttgcggcttaattccgtagtcgcttctttcttcttcggtcataccttcccagcaatgagctaaacgctcgcaaagatattgataatcattatcatcatccagcgcttcatctatgaatgactcacccgcaaggcgcacaccaatagatagaatatcgttaattgcggtagcgtccatcgtttgaaggccagcagcagcagcagcagccaacacgcctctattatcgtcaatcatagtgatagtagcgttcggatattcagctttaagcatttcaaaataatgcgttttatagataccatctttcgaatagtacacctctttataatcagcatcgccaatatatcggtgcaatacatcgcgggatagtatctggatattaccaccgcgccccgcccggatacgttgtttgcgtaggaaatagtaatcactttttcccatatagcgagcggtaacaataatgtttaatacagtgggatcgttaagcgatgcccgcatatattcaaccaaaggtaaaagagtgtcggtcatgattgcatcatgtacgcaagccttttcccggtacatgtttaaatctaagttacctttctcatccatacacgggaacacacgggcaaaggaattaataacagtcccgtctaaatcccataacttaattgccttaattgctagtttattaaaagccattttcattttctccggtttcggggttgttggtaattaatcaagcgagctatattataactcgctttgttaattatcagaagaataaagttaaggcatcggctaattcagccggtttaatccgggtagccattaccgggaggattgccagcggtggtgtatattcgctagaagaataatccattacatcgcctaacagataagtatcatcataatcattttcgcttacgacgataaacataaggccagcggcggcggcgtcaatctctacgatctcgcaaatatcagcttcatagagaatagaatcagcggcgactaattgcgacacaatgccggattctttaaaatcagcggggcgcgggaggatagcggctagagcttttaaaacggtgtcgccgtccaccgtgttaactttctggtagctaacatgcgggcgcccttcgctatcgcgggtgataaccagactgttttctacgacgttggacgcggtgaaagatttacgattgttatagatgaaagtaagtttcatttatttctccagcttatttatttaggggttatttattgccggggtaattaccccggctttttttgttatgcaaagaaaacgccgtctttaaagtcaatcaaggtacgttgaccgttttcataggtgattagatgagtctgtgaccagctagacgcgccaatgttgtaacccatatcgagggaaccagcgacaccagcagtataaacgccgccgtaaatgctaggcgtatgcgtatggccagtgttcatcttaccgagcttgcggaatcccttcgggttgccgcgagcgccgttaatgccgttgtgaccgtgggaaccgcattcgatgcccgcaattttcatcgattcgtctgtagttaagaagatcgcagcgaaatcgcagccagcaacattgcgcagggcgtaatctagtacgttaaaagtatcgtccttgttttcgattgcctcataaatcgcagcattcaggcgataataaagatgggcgttcgccgggtcttgttgaatgttagctttgctatcatccagccagcgagaaagcgctagatcgtgattagattcaacaatgaccgtttggctaaactcacgttccatttgttccagtacgcggcccgtatcgatcaggtcgtcaattaccttatcacgtccggcggcgtactgtttcgcaaggaaaacaccactagcgcggttgtgatggttgcgcgatgtaaaatcatgtacatcatgcacaatttggtaacgagggcgcaggatatctactagcgcggtttcgctagggttgtattcccagcttgccgccgagacagcgtgatccagcttttcggcgtgaatgtcaccatattgcagcgcggcaacgtggcccgttacctcctcgccaccgttcacagtaaatttatggttaagatcgtaaaacatcccgctttcgtccatcgtttcgatttggcgagcaaagaagttgccgttgtcgtcgatctctaccagcaaagcgccgtaattatgcagcgcttcggccttctggcccgctttttgctgaatataatttttcagcgtcgctgtgccagttgaatacatacggcgcacagtgtcgcccttcattgccgggacactttcggcggtgattttggcgtgaccaatagccagccctttcaggccgtaggcggtcgcagtctcgccaaagccggacagcggaaaatcagcagttggcagaatattaatttccgccatgaatgcgaatccggtttcgcggttgcccaaaaacacgttttcatcacaaatgaaatctgagaaagcatcatcatatttcagttcatcgttgccttgcccgttttggaagccttttttgttgtaggcgtatttgcttactaacagagtagcgccgagatatttcgcggcctcctgtaaagttttccagaaattagcatgagggaaggtattattttgaatcgacgttagcagaaaacggcggcccggaattaccttccagctttcgacgctggaattaagctgaccagcggcaacggggcgggaatcttccaccgcaacacgttgggcgcgtttttcagcagcgggtttaacaggcttgttactatccagccaatcgcaaatttcgctagagtgtttcgccgtgccgtaatgctctttgctcaattcgtcgcagatctccagctttttagcgcgcagacgtttaccccaaaaattgaggttgttagcagcggttaaaatagccttttgtttctcgagtgcaatgatcattatctaaattctccagttaatgggatataggcagaattgccaaatataacgccttctagctggtggcgttataatttgcgactctaaactattgccggaataatgcttgctgatattccaaaagctaccgccagaataataaagattattgaccagcggcggcaagtattcgctttcttaaaccagaaatcacggcggaataaatccatttgttcactgcctatctccatgaaattatagtaaccatagagacaagcggcggcgaaaaatccggcaataagaattaaggattccgtagggaaaaagatcattttacagtctccttttcttctacgctgaaagcgtaattaagaaggtaaatttcgcgggatgataattctaacatttccggcttaaacacttcgcggttaatagccataccgtaagtatccgcatcagggttaacccacaaaacaatatattcaggtactttgacgctgggcggcgtcataaccttattatcctgataccccgtttggattaattcatccacaacagttcccgttaatttaataacggagcctttaattaaagccatttttatttctccagttatgggggacaaaatatttaattatgcgccccgctagggaggcgcattataattattctgctgactcttttacttcatcctgaacgccaaccatacgggcgataacgtccagttgatccagcttcatttgttccagacttgccaggccgtcggcgtcctcgatcaggccgtcggcgatggcgtgctgagtgagaacgcgcacatagtgagctttacgcagggaggagccgccgccgactttgcgcggcttatcagacttctgatacacctttgcgctaaccagtttagagcgcactttaacatgcgattccgcgccgacagctttcgcaatatcgataagaccttgcgagttggctacctccagaccatcggaagcaatgataccttcatacatagaaatggcggttgcggcgtttgtttcgttccatgcgaatttttcggttttagtagcagtcatgatatatctccagttttatttaagggtttaggctagaaagttagccgctatatattctagttagaatatataacgaaaactctttattttagttttcaatttaaagctatttaaagcggcattgtatttatacgctgcctttaataattacgctattacgtctatttcacgctatagattcgtgttaactcacaattgccgttcaaagcatgatattttaagcgatataaatagttagctaactgctaaccatttatcatctttgcgaataacctttacaacgtcgccggaatcgacccggacgctataaagttttaaatcactgttttttgctttttccgtttcggcgtataccgcattaattttatcaaacgggatcatcgccgcccctttgatatatccgattttttcattttcgcccggcttacttacgtcgccagtaacgaaaggaataaaaacggaatcgccgatcattggggttttaacgttctgcatgtttcttactccagtttagtttattgggttatccggttaacactctaatattctagagtgttaacagaaaactcaattacccttactgagagaatcgacttttccaaatttttaaagagcggtgttgcttattgagattctataataaagcgttatcggcagactgtcaaacgttattttgtaaagattttagataacgcatcatgttatcccaaatcatcggtaagccttgctgacctccgcgctgataagagcggtaacgccgcgccatatcgcgctgcattttgaccagttcggaacctgccattttattcaattttgccgccggtttagatgatattacaaagcgtttcatgttgtcaacctttaattagtggagtgtatgattccgtttagtttgcataatgatttggccgtctttatgaatgaaggctaaatctacgtcgtacacatttaaataagtctctataaaatgttcggcgtctgctactgtaaacgtttttactacgtcactcagcatatatgattcttttaacatgttttcggttcccttattaagtaaagaaagccgataacgctttttatagaatcccaaatttttaaagagcgcggcggtaaacttcccgccgtgtagttcgtcattgccgccctacgagataaataataacacaatggcgtttagccgcaagcggagaattgtaaagaagcgtaaagagaaaacaggcccacgatagataggaggcgcacgcacgtgacacaatatttaaagaaagtcaacgaatatttttactatttttcttcaaaaggggttgacaaaacctatttcacacgaggtgaggagatcgcctcatacccggtatgattcatcggcttttatctaaaaccgcttagaatcgattctagagcgttttagaccctgttaataacttatacagaaagcaaaaatgaaatttaattagttatccactagacaaacgattatttttatgaaaacacgaaataatgcttgcgtttattttatgctgtactcctgttttccgggcaagttatccacagcacaaaataacttgacaacgtagaaagcgatgtaacgagatatccacagacttatccacaggttatcctactgtatatccatacagtatattccggcagcggtaatactctaatatgcccctagaacgctctataacgcattctgagcgctttaaatttagaggccatattaaaggccattgctggaggggcgcagaaaaacaaaaagcccgctcattataagcaggcttatcattagttagctaactattagcggaataccgtttctattgagtcgccgctagagcataccgatccgccacgataaaacaggcgttcggttttatatttggttagcagatcatagagatccagatcatcggaaagcgggtaagactcccccagcgcggaaacggaaacaggtttacccgctactagatcacggcaaatcagaatcagcaaaggccagctaatattgatagcatcgccccgcaatccaattttgagggtagccacttcgtcaatatgccttgcattctggcggctaacatattggatcacggtttccatcgttttatagtgggccagaaaatatttgttgacatagatgtaaatcatagatatacgaccccgctaactttccaaccggattttaaaccttcctcaacatgaaacatggctttctccaataaggggggcggctagagatttagccgccgggagggttttacagcttatcgcggaaagtatcaagccggttgttcagctctttaatcgcgtcggcatggatttcgtcatacgttgacacgatatccgccagttcatccatagttagcgaactaacaataacggacgttttcacctccagcttttccggttccggttccgctggtggcgtatccaaaaacgttagcgagcctaaactgatcaggtacacttccatttcagtagcgccggatgcgcagtcgatttcaaagctactatcaccaatacagatatcaaagccatagccatataccccgataatcctcaaggggattcccagcatatcatctgtatccgggtaacagtcccggcggtcaatctggcgggccagattatccaaatttttcggttcgacgaaaatagcataattgccgcgatcgccattatcacgcaggtgataccagatatcggcaagcgtcatctttttaccttcaaaagtagcggtaaactgttccatttttgtctccagttagttagcagggtaattattatagcgccccattatagaggcgctagggataattattctgctacgtcgttttcaatcaggctagaaagattgacgccttttaatacctcgtcaatcatttcgcctacattgaaactttgtaccagttccaacatggcggcttgcattgcagcgtcagccgcaatcaccgctttgcggttgttcggcgcatactggctaaccgcgaaattcagcaggttagcaattaccacacgacctaccgccgtgtcaacataaccgcgaaccataaacggcgctttgctggcggcgatgccggaaacttttttcaggacgatagaaccggcttccagtttagcagcgtttacagcagcgtttttgttagcggcaacgatagcggtagcagtagatttgatagtattcatttgtaaagctccagtctcaaaattattagggttaactacattttcagtaacagccggggcgacttcttctagctcgccatcataacgataatttccagtccttgccccttcttcgatatcgatatcatagaagttacatggtaacaggatgctaccgtccttgtcaagcacaaaaatcatcatttcgctagagattcgtgctggtggtagttccagatgatcgcacagatttttaacccatgcgcgggcatcagtgaaagcgagcagttcgctttcatggtaacaaaaacgtctcgacgcttgcttaccttcggacgccttatacaaataggaatccgtagtagtagatactatcagatcaataggctggctgtcaaccaaatattgatcatcgtgataaataacaatcgccgcgccggggttggctagagcgtagtcgcggcaatgctcaaaggcatagccggatctactttccatattcgagcggtaaacgcccaaaatatgaccaatagaggcgcacttactgccatctaacaggttgcgagcgccaccgcgaaccataggcaaattagcaacgggggtaaacttctgtaacattttctgttactcctttgtttggctgagaatctattatagcaagattctccgctttttagcaagcaaaatttttctatgcttgccgggagatcaaactatagggaaatcggatttgattgtctaccactaaaaatagtggttgcttcccgctagagttatgttattattatgactccaaatagaggagatcgaaaaatgactttttcaatgttggcgctcggtttagtcggttctatgatggttttgggttttatcgctttttgcggctatgccctctatgataccttgtttaataaggaggctttttaatgagaactttgcgcggtggtagtcccaaaagccgtagccataacgtttaccaattgaatgttattcgtgatggtcagaaaaagggcggtggcggcggtgagtggggttttcgtgtcatcatggttattattatgaccctagtatttttgcagagctgccaataatgagcggcctaatgtttttgggcgtgatagttattagcgcaatcattaccctgctaatagtttcagttgtaaatcacttttggcctgagtgtttccacggcgatatgtaggaatgtcgccgccctcctccaccgcgtgaccccttactaaaatacccccaggaaaattaaatcgcttagagcgcgttctagagcgcttaaaatcgacattagcagaaagtgttgccgggaaatactgtataaatatacagtaggataacctgttgataagtctgttgataactcgctaccgatcgattgaggcgtcaagttaatttacaattttgtataactctggggataacttaaatgatagtgtttctcacttcctttccgaaatgcaaatcattctcattcgtattcagctcggtgaacgagaataattatcattcgcattcaacttctcagatgagaatcgttctcattcgtatttgcatttccgacccccggcccttcctgcgcttatgtgcaaatccgacaatttgtcaagcaaaatattacgtgaggctgctagggtatgtgcaaatccgatgaaaatttatttttaccgccctgggggcatgtgcaaatccgacactaatatgtgcgaaaccgataataatttttaggaggaaggcgcgcagtttgctgcagcgcagcggtgggcgcgagtctgggtgagcatgtacaaatccgatgggtatttttgggggaaggataaacggggttaattggggcaattcggggatgatgggggcagggggcagataatggaaaatattatgagttaaatgggggtaaaggggttgacacagaaaaaattcctgtggctctaaaaaacaagcgaactcacggtgacacaccgtgtaaaaaggcttgaaatttcaggagatattttatattcgcagaatcgaagattttgatccacagctaccgttcgtcagagataatgtgcatttccgacaaccgtttgagtatgtgcaaatccgacaatctactagctgtgtgcaaattcgaccctgtttttgtgttcaggagtaatgtgcatttccgacaatcgttttgttatgtgcaaaaccgacaattgctagaaatctagaaatgcttagcttctttaatatttgagagctagagattttatttagtggatgtgacgcttaggacttgggcaaatgacgtgagtttgtgtgggaacttcgtgaggactttgtggagtgacgcttaggacttgggcagctagcgttttaatgtgtgagatgtgtgaggcagctagagtttggtgtggaacttcgtggaattgtgtgagtttctagaaattgctttccgaaaaagtgagttggaaaataaccgccctccccttaggtgttggtagataaccgccctgtatagaaagatgactagagttcaaccctagagccgcgaaacgatggtgtgtaaggattacctacttttaaacgtgagtaatcgtgagttcattcccatgtttccctatttttctccttagtttccagtaattaataattccccttagggttttaacgagctatcgcacaccccggctagcgatactgtgcagattgatcaatttttgtaatttcgcactaagtgtcttgagtcgggacagggccctgacacttacgaaattgaaaaatcaatatctgcacatctctagcggatgtgttaactatctatttaatctaacttttttatcttatagagttattctaacatacatctgaaataatgtcaagaatttttacgagagtgtttgaaaaagtgtcacggggtagatgtttaccccgtgaactcgtagactacagttgagaacgtaggttctctaactcagagaggaaggcaggattcgtttgatcgaaatccttaatgaggaggtgctgatcaaaggagaattcgtaatcttctccgtacagcttaatgaagaggtctggatgttcacgcttcaacacaacatgcgctacgatactcggggtgatacccccatcctctttgtggtaatcaaataaccgtagagtttcatgtctagtttctggtttagctggttcttctttctcaatgccccaaggagtgacaaacttaggatcaccacctgggaagacagaagctctcatcttataggcgtaagagttgagatctttcatcgccttaccgctctgccaaactgcgaagatctcatgtttaccttcagactctctgaccggtaaataatggtcagggtagctggttagtgcacaacggaaggggtcaccgttatagctaggagcgtgagaaccataaagtgtgtcatgttttagtggttcatcttctataatatagagttcaccaatctgcggataagagaaccactgattgagaactttaacagcgaagcggtgtgcgtatggtgtcatcttgagaacgtgatacttcgctcctaaatcatcttttgccgatttaccgtcctctgttactgcgtaacgtctacagaacatctctacgagtctacgctcgttagttgtgagagttgagtatttacgttggtgcagctcataaagctcctctagcattccctccagcttagttaccatttcctcagggtatttggggaagggtttctctactgcattcagtactgcgttagacgaacttttttgtgctctttgtagtgcatttttaaatctgctcattttcttttctcttatagtccattggactcttttttatagccacgggattgtggctcttaacttacttcattccacctaggatgtgagaacggctctctacctgtcaagcgatccatcatcctccggtgctcccgctctctgtgttcattaaacacccgaagagcggagaaactgtccactggcgtgtacggcacgccgttaactttgaggatatcctcgcctctgatcttgaatagcgggttgtcctgctgggccttagcgtggcattcgctcaagtactctgcgaaaggtttgccatcttcccgagtacatagggttcggagaagatagctacagttctcaccaaccggagtccatacttcatatttctcgttcattgtgttatcctcttacataaagaaatcttcatcggattcagctatttctttataaaagccgtgatatgcggcaactgcctcgctaggtgctgccatgtcgaataagcgtgctctttgttttaattcagctttattttggcactgcctaatcatctcttcgacttcttgctgtaatttttcgtctacacgaaccaccagctcaccgtcgtgaattgccccgactttataagtcaacatcgtgagatagccaggatgctgtcgagacttcttgagaaccacgttagtaaacgctgttagctcatgtacgaatactgcacctgggaacgcataaggagttagcttcttacgagcttttactgccttaatatcgatcaggtggaagaagtctttcggagtcttggatatgtcgtccggtacttctagctggaactgattccagaggatacgaactttgttttcagacatgccgtagacaatgtacgtttcgttagcttcttcaaaatcaactgtacagaataacataccctagccctcttacttgttgtagaactctgtagcactatcccattttatgagactctcgacatgggcttgatcccagatatttctggagttagtcagtgccgaaacatgcggctgaataagttcgaacttcccaacggtagcaccgctagtgagcagtaacgaggttaatgcttcgaacttaacggtatcgctaccagatagctcgcttaccgctttaaccttgtcaattatagagatcatcttagcctcttcacccacgaacgtaaagcgcaggttgcggaagcggaaggagatagctgctacactcggcttgctagagtccggggagtagtttggatggaacttgatctcggagactgattgatcagtcagatagttggtgctcggattattcagggaatcgtatttcatctttaacctccaaaggctttatcaatttactggagttattataccaaataatagagtctccgtcaattgaaaatttgtgataatacgctggcacggtgtaacttccataatccgtaactctagtaaccatgcggtgtctgcatttttggcaaccattgccttctaggtgacttctagcagtttgcataaagtaatcctgatggtctgggcaccatatctccaccagctgatttaggctgtgaaacactagcttctcatatccaaagaatactccatgagcgtctagagcacggttaataaagataaggttcttagcatcttgcctgaaatctggcctcagttgctttatcttattatggttgatcgaaccgtcgcgtttaaggaactgattaatggggaaggacttagcttcccatactagttcttgatttatcttctgtcttaattcttccactactcaaattcctttttcaacctctcgtacaggtctttggactgaatccaattaagatatactcgattaggttgattgccacctccacgttgagtaagtataaaacactctttccttactttttcaacagtaactgcagcctggtctacgggattctcccctcgtaggtagttgtctatagatttcatttaatatccttaaaccacgaaaggccagagcaattagccctggcctctttgttaggtgaacagatccagaaactcctctggataatcggaaggatctccaaagtcgatgtgatctgcgttgaccgggtagccttctttcgtcttgatgccctgaagaacatgggacaacacatcaaagtctacgctgctgttgttagtgcagcttgcccaggcttcctgacggtggacgcacttgccatccaccataacctcaacaccgtagccagtattccagcaaccgtattcgcaatccccagaatcttcttctaggaagtttaccacaacacgtttcttagccatttgtcactctcttagtgaatagtcccgtcgatgccttccacatggatatcaattgccattttcagcattgactccgatttatcaaactctttcttcgaggccaggagtgcttcaccacgagcttttccatactctgcaatagcattcagtgtatgtttcaggatatcatcggcggataagccctgagtttgccagtggacttgagctgtggcgatattcaccataaacttactcagctcaacacgttcttcgtctaacgcctgcattacatgggttttgcagttatagaaggagttcagacaaatgtcttcttcggtcagaccctcaaccagaagcatcttctctacttgcgccaggcgatcaagccacggattttggagcatcaaatttttcacttgcatggtataagttcccgtcgttaattggtgcgaatgatttagcgttgcgttcaggacgttgtttagcgatccagcccatcatcatttgtcgaggaaggacaacctcagtgttaaggaatacttcgtaaatccagtgacgtgcgttctgatatttaccgaactcatacgctttcttgaacaagccccaaaccatgctaagttctagcgtctctgcatttgcagtctgtcggaacggtatcactttggagccaatgagttctttcagagcggagttgatatcctgatgactgaacgtggtctcatggaactcgttgaagaaacgataatccagagcgttattagcgttgacaaacatctggatgaacagatcgctgaactcttggtgctcacgattaaaatattgatttaaaacttcagttgatgcggccatctttccacccgttaattgctacgagatacatctcgtaaatgaatacagtgactggttgaattgcttccatgtagaacgtcgccgggacgttatggaagactgaaaccaccatggagaggaataatgcccagcctaggaaacggctgggtagttctcgccatacctggaagttgcaatccaggaagttatagattcgaagctgattaagcattggtcagtctccagtaatagtgacgagtattaaactcgaaaggttcgttggtgatcttggtgtgcagagtgatgatatccggagagtaggactttgccagatctctgcgaaccatcacagtgttaaacggagcgccatcagcacgctgaaccacaattgccaagcctagaggaggaagctcactcaaaggacgccatgagtccttttcagcaagctcaatcttggcgattagggcaattgactcaacgatatcttcatcacaaagcaaatcgtggtctactacctgacgcagagcatctactaacacttggcgttctttggagttaagattcatttttcttccttcttaatggtgttttcaatatcatccagcaatgctgtgcagttatcgtagttaactttgccccggccaaagattctcaaaacacaggcatagtacccggttaacagaattgccagaggatacagaggaaccagcattgctgccttgatagtaccttttaaaccgaagccgtggtacttcccggacaggtagccaacaactactaagtaaagtgctgctacaattggtgagatcatttcttaatctccgtgatcaaccgcattttggttgtcttcgacattgtggaatcctgaccgataatctcttcaatcttagccaggcgaactaagagtcgttcagccgcagcagagaactcatcggcgtcctgtacttgactcatcaacttctcatggagtccgttattggtcaatctcattctacggttattttcccgcagtattgatacccaaaccgccagacccgttccagttacgagggctgctattaacagcccggagagaatttctagtaccattactttttcttcgccttttcacgtttcaggtcacgttcaaagctatcagcacgacgctcagcaacctgctggtgttctttggcccaacgcgcctcatttttagcgaggttgtaggccgcagcatttttgttagtaccttcgtacagagcacgaagtgccgggagagacagtttagcaagctgaccttcgaacccatccatatccagcaggattaccagtaccgcaaccatttcgtctttggtcagggtgttagcttgttcgtcagcagttttaccagtggtgtaagagatagtgttcttagccataatgatttccgtccgtttcgttaatttatgcgtatattataccgaaattctaactacttagcaagtgaatttttaaacttttttaccaatcgatccggtaagcgtaaacttcagaatgaatgtgttcttctaccagtttcttaatctcgggccagttcttttgaatctcgtctagaacatagtcgttcgaagcgtcttcccattcgtcaggagtgcgcatgaaagagttcgcatactctagcacactctctagaacgtcagtcaggtaaactatttccccacgattacagtaggcgtgttgataatcccgacgatcttcgttaaacggggagtcgctgagatagtcccccatatgaagaagttcatcggcgaactcttcaaatgccttaacacgagcagatagcggtatgctttcatcacgcatcagcaggttaaaagaagcacgggcggtgttaactgcgtggcgaagggactccatatttgcattcagttcgatcattgcgtttttcatatttgcttcctcatcaatttataaagctattatacagaaaaattggctcggaagcaactgaatttaaaatacaaatgctacgagcgcccagattccgcctacaattgctgcaccgactaacgcagctaggattaagaggccaaagaacgccttggccatatcatttcccattccagtatacatggttactcctcgattaccagtcttctcatgtagtcgttccaccctgcacagaatggagaaacaccccggagtagttcggtggactggtgctgcttataatgatcttccgcagctttagccccacgtttcttctccgcccttttattaaactcttccagcgcgatacgtccttctagagcttccttagcgataggatactccggccaatcctcctctagaacgatatagttcgggaatcctaccttgccgtcagcctcacgacctttaaagatcagagataagctgtcgtttatctcccggatagcagtgctggttagatacttagcggcatctgactgcttaaatacaatatagcgagattcgagtttcatgatttacctcaggcagtgaatagaatgtcttccattgggcgatctttatggatctcccagaattctttgggttcccaggtttcagtgtccggggcaatagtaaccgagatattcgcgtcgtctgtaaacacggagtttccgttgtccagcattgcgacacatttctgcaactcgaaaccaccagcaactacgaatacttcaccttcttccagatctttgaaaagtttcatgtctcacctattaaataatgtcagcggaaccacagggatcatcacgatttgtggtaaatgtgtataattgacctagaaccggcgacgccacggtcatgcgaccgttaaaggtgccacctgtgtccaaatagacacggttcttccagcgaagtgggaacgggacaccagtatggccatgaaacgtgtagtctactcccacgatttcaggaacatcgactgcgcactcctcggagaagctggcgtagcgatcgaagtacggatgcttctccccactacgatacagattaaacccaacttcttggattacatcacgatcccacagcagtacacccaaacgacgtaaatctggtgtagattcgtgttcgtgcacaatgtcgtcccacaccggtacagttacacccataccttgagcctggtagcgcagagggataccagcatgaactaccccgtaacgcttgccacggtgttcaacggtcatcatgtacggcatcttgctgtccatgtcctctgcaatgcctttcagggtgtccgtatcgaaaccttccgtgatagtccagctaccaccattatacatccagttagcataatcgtcctggatcatgaactcgtcatgattccctcggacggaacggaatttcgggttgtacaggaacttcgctagaacctgtaagttctttgggccacggtcgataagatcccctacgcagaacacgtagtcacgaccttcttcatacccagcaagttttagggcatccatcatcatatcgtactcgccatgaatatctccgatgaagaagatattagcattgtcgggcacggtaactgtttcatgtacgttcattaatacctcgtctctaaatagtaacgttttggcagcgagaagtctgtgggctgctgcctgtgatctcttacatattcccctcgataggggtcgtatattacgtattgcactagaccttcgggttcccaggcaatcagtatttcattgcctattcgtttaaatgcgtacccattctgcttagcccacagtatacacgagtagtccaagctcctggcatctacttttatgccagaaaagcccctctctacattgtaggtgataccctttattaacttatcgagctgtattttcttattatagtaggcagcagctcgatttttacgggccatatcagaagaccagtctctagagaatttttgcattatgcacactccacatcgtcgtgttcatagccatagttagtgcaggtgttagcttcatcatcgtccttacagaacgcaacgtagcagtctacaacttcccagaacgcttcgttgatcagagcattttggtgggttagatctaattcatcccactcttcttcgctctggaaatccgtatgtacgtgagcatcacaacctacagcgcctagagatacgacaataactaactcgtcatctaccatttccacgtaagcctctgcgtactcccaggcggcttcattaacaatctgagtctttacttcggggctgagagcttgccactcttcttttgtgtaccccagatcaacgaaggtagtaccaaccgcaaaaccgttattcaggataagatatgcttgcttagtcattatgtaatcctctctcaattcaatataaatattatatcaaaattttaagcgtttagcaaataataaaaaaccccggtctcgtattgagccggggttatgtattattcttctacgtagtcgataaagtcttggatagctttactaactactacagagcgaagcgtggcaccactcagaatgtgatgtgcttcttcacgtccgttctccacatccaccaggactactgcgggtacagtgcgaaggccgaacttacgtagggaatctacgtcgtccgtgcgtttttcaacgggcaggttgaactcagcggtgagcttatcaaaaacaggttcaaactgcttacaaggggcacagttagaacctttaaggaatacaatcttcttagacattattaatactctccaatagtgttttcattgtttttacggttgcggtatccaggtctagcttttctccgaaagcttccattacagcttcctgatacggctttttcagacgaccctcaggcactgctacttttttaacatctcctgccttgacttttgccaaaatagtggttaaagttggcatggaaagtttctggccctcaatgttaacgccgagcagttcggttagcgcattgttaaggtcaattcgggtcattttcttaccgttggacataacaccctccgatttcttagcaattttcttaaactccggtgactcacgatcccgcagagctatatttaactcgtagggagctactttaaaatgctcgcacatctgagtgtagaatctgtccgacattttgtatctcctctctcgaatttataaatatattatacgctaaatcgagcagaaagtcaattgaatttttcattaatcgcagtacttgcctcgtcttacgaaaaatagtgtaatggggtaaactgagtacatcaacacaggagaaataagagttaggatagacgtcactccacctgcgtacattagcggtataaatgctagcgttatagctaggactatcataccgaataacaatgccaaggacaatgagaagcaattctctagacctaaccagagccagcaaaatcctgtccctctctttttctcacatggacagcgaaacacaccaaaaataccaaatacgaaatgtaggagccatctagcaaccctagctaagcgtgttctgcgaaaataaatggcaccgcgtattaaaatccatgttgcggaaaagaatactataccaaattgaaatatcttgagtagcattatagttactaaacttgcaaacataaccacctcctatttgcttgctccatacaaagaaggggagcctaaaagctccccttaatgtcacagtaactctacgtgtccgccgtcatacgttccgcgttggatttcatcacggtagtcgccagagttgttccaatccgctccgaaacgaacggcgatgttcatttcatttgcggcctttttaaatgcaccgacaatagcccagaatgcttccaagtcgttccagtcaatcttaccattgatatacggagcgaaatcaatggcctttcccgtaacgtgcttagacttgctagggtcttttaaaaatgaggtgccattggcaatattctgggcactctgttgtacagtacgtttgccctgaatgatggtaaaatcgtgtggtgagagttccagagcacgaatagccagagccttaagtttaggatctacagtatcgagctgctggagactacggtttccaaatctgaaactcatattgatctccctagtgatctctgcggcgatgcgcagatttttgccatatagtcattaaacatgctcatgtcctcgtctaatagtgggtatttctcccacgcgacggcaacatatccagcgtagatgttattaaggttaaaatatgggcacgtgtacacatactcgaagtttgcactcttgaacggcggcaaacccgttccagaccacttcgataaaccttgtttattccttgcatctattgcaaagtttagaccgtctaaatgcgctcggtagagcatagacgtcttgtcaactgctttgtcggatacatcggatttatccaactgaacgttgctttcccaagctatgatagtttggtaatcatttatagcctcaggcttgtatttaaccacgaagacggcatcagctcgagtctgtgagaataggatcattgccttctctcgtgccacatttggaaactctagtgtgcgttgtactttaacatcttgtaggaccgccgaagtagagaaagtctttaagtacgacatgacttcactcgtattagctataaagaggtagataactagaccaaccagtaaggttagcaaacgtttaagaagagaagctggatccttcgcttcttgtagtaacagcgatatcaactgtataaatttatccattaagaacctcctctaaccatttataattataccctttattggaggaagttgcaataaaaatttatagttattgctcggatcatactttgagacaaatgtcaagtagaatttagataaagaaaaaggccagagctaaaaagccctggcctacttagttttattgacccgcagccttacgagcttcttgttctcggtgcgcagccatacgatctacacgttcgttgatttctttggaggtcagccaaatatccttaccaccttctatcatctcagtgatctcttctagagagaagaatggatagtacaggtctagcatcatatcctcgaagaacgagttaaactgatcggcatagtgctggatctcgtttttacccttaccatagtgtgcgccacgataggtatgacccatcaacataacgtaagggtgcaccagccaaccatgacatgctaggaagattgagcaggcagctgatgctgatggcccaaccaggtgcccaattacggttccctggcagttcatgataaggttgcacaactgaactgctgtatcaacgtacccgccgggactattaatataaagattaagagtgtctccctcttgcatagttgccagagtgactgataggtcgcggtagtagtctacatcgactatcggcccatcgagatgatagtggtaaatattatactctgccttagtcgccaccagggaggcgaagtagttaggagtcttattgccacctttctgctctacgttattaatttgtcccatactattaccttatataaagagaatcctctcgtcgcaaaatgcgtttacatttttacgtaaattttccagtccgtcaaagttatttgtgaccacattatcaataaactcgggtgcaacacctctagcagaggcatgagtagattggatagcgtggatgttgttaggggcgtgaactttaagaatactagagttctgcgcacctgggaagttccgaactagcgcggcttcattatcaaaacgaacatcagaaataatactaatgtcagctttggtagcagtaatacgatcaaccacaatattcaaccacaagttctcatccaccagagcgcgtcctaactccgtgccaacaaattccagcattttacgaggggacgtgtataatgggtacagcggggtctcatgaccctgatagaagtcaggcgcagattttgcgatcaacggatatagtgttgacgcttcaaactgaggccaaacgtaaggaaaatcggcgtacttgtcgatcccgaaacgtttccagacgttagcagtacgctcgagggcttcctgagtcacccaaaaccactgcttgatctctttcgtcctgcgctctgccagcttttctggcgtgactccaaggattacagccgcgagttcataaactggagctgcaaaactgaatttactgatagaatactccggaccgaggacttcccaggcccaaaccttagccatgtcagcaaaggtgtctttgcctgcgccggcatcaccaactaatcctaaaacgtatttcattttgtttccttattgaacggtttgcaacgatattcattaagtgacacgcgataggtacacgttaatgcggtaagattggcaatgtaggtgtagacctgctcattacacttgcccattgtgatccaatcctggtaaggtatgcgaacatacactttcccttcttcgtttatgaactcaaaattaaacgggcaagtctgtaggcttgctggccacggtagatgttgcggctctatccccgttactgagctacttgggtctggccgttctgcacacccggatgcgataattgcagccgagagcaggagtccatatttccagttacgcatgaaagtctctcctggaattcattaactttgtcttttgccaccttggtagcaagtttaggtttagcggcaaccacgccctctttggctctagctgcatccagtttattaatacgtccatccagatcttcctggttcttagctaggttggttatgtaggtagtggtgttgcgatctcgatttctaatctctgtttggagattaccaattgtcttttctagttgttcattacggtttgatagggactgtaaagaactggacatatctgttagcttattggtaatgtagtaggcaccaccgaaggtgcctgctgcaattgccagaaacagaattgctccagtcttaccgctccatattcctgaaagaaactttagcatcgaagcccttagcaattaaccgatcacgatcagacgtagattcggtctttggttccccttgacccagcacaccgaagatataggattctagggtctggtgccagcgatacaggtttggatcaatttcctgccacgggaaatcttccgcatggaagttgaaatcagttttaacggtaatgttaaccgttgggtcagtcttagactttgcagcatcccatgccatcgcaatgggcttgttgaaggtctctaggaacgcagaagccgtagcagttgcgttacgaacatgagcgtcgatcttctcaatcgtatttatgtcccaacccatccgcaggtagtatccttggtcttccagtacctcttttactttaactggatcgaaagtctggatatgcacagcatccgctcctaggccagtgtgataaccatacagccagcgtagtgtaccacaaatcaatactggacgaacttccagagttcccatattaacacctccgtatccaaaggaagtgcggttacgcaagatttcagcgtagaaaataatttgttcgaaatcagcggatacgtttacaacctttttcacctcttcgcgataccatgctctttctgcatcatacatagtaccttgtagatcatatacgtcctttaatttagagataatacgcatctttgttctcctctcatttataaaaccattatacaacattttaagcgagagtgcaagtaatttttaaaaaagaaaagcccaacacctttcgatgctgggcttggatatttagcgatttagcgggtgatgttccacacagtaatcgttaaagatcttggctcgcttgatgctatccggtttatacttagcgaacgggcctttcaaagccccctgtaggatgaaaataaccttacacagtctgccgatagtcttgcggctcatacagcggagctctacggcatgcttaccgttacgaagctctaggatcttatcgaaggacttcaggacaccagatgcatctttggcaccgccttttgcgatgatggcctcgatatctttacgggtggcaaacttagccagaaactcgaaggctttagctgacagcagcttagcagagtccagaccatgattgataccaactgccatccacgctgatactgccagtataaataaagtaaacattttgcttcctcagtttgtctttgaattagttaatggtcagcgaccaactcaccacttcgttcatcgcgggcacgactccggataggaacaggaaggtgacccctataacggccctaccattatacgtgtgggttcatgttacacatcatccgagtcttttctacttcccgtcgtgctttgcgacgttgccgtcgtagcttgtattcattttcaataaccttatggaaatggtcattgatgttatcttccggcagcatcaaacgaattgttgccaactgctcaatctgaacccgaaggtgggagttaggcatacaaagctcttgcatctccacgaacccggataatcctagagcggtcatagaggctttagcgtatactttatcctcttttaggcttagttcaacggttatccggtagcgattatcaaacacagtacaccactccgagggggctgcaccagctcttgcccagacacagtaaggagcttcctcaaaagcgcactcctcattaatccagtctagggtctcttgaagtttggggtgaagattactcatcgctatcatcctcgtcttctacctgacgaccatagcggtccagtgtcacagcaggcttgccgtaggttttgttcgtgtagatcttagtttccccaaaacgggtttcagatttacgaaacttaccagcttctttagtaatcccattcgttgttacacgaacccgcccgttatcagagatctctactttgttacgctctgcggccagagatactccagagtacatcatactgaatacgatgattgctgcaattgaacgcttactcatagtcttcaccttcgttatcttgctcatccacttcaccttcgaggtctggctcgcagtcccggcagatttcctctatttggttctccgccctttcaaaagcaggacaccaccacccgcaattcacgcaccggaagatctccatatcttccgcggtctgccagaagagatcctcgataacaccttcgtgaagattatgcccgttagccaccagctcttcttcgataacattgagagcctcagtttcgcttacacaggaaccttgtacatacccgtgcattaacgggcggataatgctttcgatacttagtttgctcatgaagctctccctatcaatttatgtaactattatatcgaaaaatcgcctacaatgcaactgaatttttcaattctttggcttcggcacgctttcttttgtattcggcagctcccttttcgagttccgaattaaggtagtcaaccatggtatcccacttacggtttatccagtgacgagtaccataatgcgagaatacctgtacggtatagtctaccggactggcgtctttgacgctataccaagcctcaggactaaactgcttgaggtcatccagctgaggggtaggcatatccaaagccttttgatggtacagttttgtcaggtcaaatactttctgctggtaacgttcatggtcacgatagtagccagagagtcgctccactagtgattgggctgcttccagattacgagaggttacaacgcaaatacgatccggcaacccctgctccatgaattcatgtactacacaatatcctagatccatattaacagctccagctacatttaggacacgggcaggacagtgcgtgtacgcacatcttgccgtttttatcaacaccagtaccgtgacacttggtacaggcagcatgtaaacacaccggtcgttgctcttcgactaacttcttaataaacggagcgctttcaaccattttgcacaattcttcgtgagaatatccaaatcctgtagtaatcattttctacctctgcgtttcggagtgggccaggaattagtcttgccgtgagtaacctcctggcgggagctacgtggcataaagttattaccaatcggatgttcgtgttccatttcccgagcgtaggattctaactctagaaagctggcttgggactctcgttccattctttctaggtcagtgaagctgggaaatccgccgatgccgccgtagccaataagcattattttcggcacctcgacattacgttcttccagtcgtttacgaacaagttctattgcttcccgagcaattttatcgtccattacgttcctccttcggtaagtaatcatgcagctctacataagagatgttctttctttctttatactctggcttaccatacataccatgcacttctactactttggcgcgacgaggattattaaacataacattccccggtatgactactacatcacctatctccggggagtatttccaataactaggtactcggtaaacgtaagttctgttactgttggaaaacttaattccaacgtggcgagtagttgaagccatgatataaagccttagccgcctgccgcggcatattaagtttttcagccagttcagaccagaagtctttaccgcttaccatgttatatgctacgatgttcccatcgaaatctttgagacgctcggcctctgcctctagagctggtcggttcttttcaacttcgagctgaaactcgttcagacgcatgaagttacttttgtcgcctaggaaccttacataggctccggctacaccatctatggaggaagcaccgcatttacaggtctgcattttgtggtcgaccagttccagggtgtcacggcagcattttacgaaatatacaactttactcataatcattatatccttcaactgtaaaccagcgtttaacttgtgtgaagcttacccaaataccctcatttgcgtcgctccgtaatttgtaccctgctctactatcgtgtagttcaacgaagtagagcttacccggagtgaagtattgaaacttgtgacccccaacaattttatactggaggccaactccaggagtgaagcgtaagagactagctttcaccatatttcttctccaaacgtttttcacgcagttccgcttttctcttagctacacgttctcgcagcgtgccgtgttctttctcatagcgcaggtgatgcttgttaaaatcacgcttcatacgaacagtatgccagtactcttggctagcaatgaagatagccgggcgagacagcctaggaacatcgtatagctcgaacatgcgcttcatttctttatattcggcatagttcataatacgatcaccgggagcaatctgattgtcccaaacccacttttcgtgctcccaatccgtatagaatgctctgataacgccaggggttacttcaatttcgtaccacgctgtcttagatacacgatcgtgatacagccctgggcggttgaatacggggtttcgctctttttctcgccaatcatagaatgtaccgtctaacgcttgctcaacagtgcgtcgtgttgctttgccccagatgtagaaggaatcaacaaggctagagcgaaagactcggataccacgtaaagattgcttattcattatttgatccccaatgcaagaagatggttagatagcttatccagggcttccagagcagctttgttgttttcgctcaagttgctaatagtcttctggagactatcgataacaaagtcccgaactgctaactccgcagcgatcgcagacttactattaagtccttcggcggtcattgcgttaacgtgtcgggtataataaccaccagcgaaatccagctcgtcaatagcacgttcggcgtaatgcaattcattcagttcattgagttcgttcattgattactccttatccatcatttcgaggcgttctttgacgtataccagtctgttgtgctgttctttcgctaactctgctaatcggtaaatatcagccactaactgcattgtatggtcgtccataccatcaggtggaagcgtatctgcatacgcagtacagatagcgataaactcttctgtgttttccattgttactttcatcttggaaacctctctcatcaatttataaatctattatacggcaaaattggcatttttgcaagtgaatttataaagaaaaagcccctcgctcaaagagacaaggggcttttgtttagaggtcaggaggtgcctcagtgttcttttctaaggatttttgtgccctcagaacaatctggtttatttgctccagagagtcgaaggaaagttgcaggccatgaccttcatcggtggcttgtatgaataaaactctcttagaggcgtctacgaagacttgaaattcttgttccactttactctccaaaaataattacaggacactggttttctctggctatacgagagacgtaagcgtttacgccgtacttaatagccaagctaggctcgtcaaacatgatgcagctgaatcgacggcctatacggtaggtttctagcatgctatacgttgtaattttaacgtgaggttgaagctcactattcttcttttctaggcgtgccatctcacggacgccggatgctacgtatactgcttgaatacctttaaatactgcaaactcataagcagtattaatagcctcaaacgtcttgccagtagctcgtcccggatctactgatagaggccaacgaaggtcaagttctaggaacctgaatagttggttacgatctatgtacatgctggctccttaaaccaaacaatgcgaaaacctgtctcgtcctctagggcctgtactatttgctctagtgtcataaccttatcggacgagaatgtccagagaaactgttggagttcactccaagactcggcctccataatcggaacaccgatttcctggccgaaataatcatcagtaccacgaacgtcaatgcgaccaccggcatatcgtttggcaaatacttttcgagttagttgccctccgtctgcaaaacgattcggctcggttacttccgtatacggaatacccatacgaatgtaccaattgttggagactggccccataaaattggtgctataagtgatcatgatcactcctttaaactggcaaaccccaggagactcgaactcctactgcacggttttggagaccggcgtgctgtccagtaacactcggggaatagaattagctaccgtggtagacagatactgtcttaccattctgattcataacgtaagctacctcatcttcttttaggaagatatgctgatcaagaccagcaatagagatgctcttctgcttaggattaaacccaacgcttgaaccatcgtgaatttcttcgccaccgttaggtgacattaccttaactgttaacatttgcttctcctatagtttgccatctctggctgttaagtgacgtcctaactattatagagtcgagttccaggcagacgtcggcaccctggactacattggctctagaacagcaaataatttaagagctaaacatactaagacgcagcgcacgtacacgatctacgcaggcttccatctcagctaagagtgagaacactagttctgcatcaaaggctttcattgttgtacctctcaagtagtatcgacaaaatggccttaccggctcccagttccttgtttaattccccgcaacgtcaggggacggtcattttatcgaatttggagcgactagggggaatcgaaccccactcagtaccgcttggaaggcggacgctgtaacccgtacagttaatcgcggaattaatgggctagtctcttcacctcagactactacttgatcattacgatctgtcggtagccgcgagcatcgacccttcatatttattttacatctacagaaggtcattagatagattacttacaactacagccaccagagaatatggagccgtagcatctgtcacacataacatcttctatggaaagaatcttcatatgcttaccttttagggttgctggcttccggaattgaaccggaatttaacgacaatgtaaacttaatcacactgtaaccataaccagcaaaaatggtgccccaagtaggaatcgaacccacgacctaccgcttacaaggcggttgctctcccggctgagctattgaggcaagattggtctcccctaagtgatttgaacacttgacctgacgctcccaaagcgcccgctctgccagactgagctaaggggaatttgtatagttatgggagaaggactcgaacctaccatcacctgtgcggaattacgagaccatttgcctacggaatcgaaccgtatctcaaccctagccaggccgacttccccatcagtcgtgccccataatttggtacccactcccggactcgaaccgggaaccctgaagtcttaagcctcatgcctctaccagattggaccaagtgggtattaatcgttatccaagtaggcttctatagcctctagggcttctagagtagagatattgaatctctctttaagcactaccactagagtttcctgattccaggaatctacggaattaatgtagttctcgatgaaattagagtagccacccattatcgaatctccagaccttggaagtagcgagggaacggggagcctacttcaaagctgataccccaattgagttctaccagctctgatttatctaaaagcagatcattgccttcaaagatgtagccgtagacagtagggaacatcgcagccagatcttccatatctgagtgagcgttatgctcttcatggaactgctcaaactcttcaaagaacttttcaaggaagaattctggtacaatgaacgttacaacatcagtgctatcatcggtacgatagaccgttgcttggaacagaccgacaccgactaggttgatagcaggagtagtaaagatatccattattaatataccttaattaaagtgttatcgatggtgttcagaaacttaactgctgcgtctcgattggagaacgtttccagtactataatgttattttcaggatcaccattacgtactctgatctgatacgagacaattacttcccagcggaaccataaagcccgtgggttatatcgcaaaagaattttctgattcattaggtaagccctctcattaatttatgaatctattatacattaaataagagcgtttagcaaatgaattttagaactttcgggaaaatgccaccctcagtcgatgccactgctagagacgttataggcaatctatctctagctgtctgccccattgctttcagtggtttctgcacgcagaaactcttcttgactggaggactttaccacgtcaaacggccggaaatcggtggcttgtttctccgttcattcatcaatcgtttgtccgagtttaatcggagaaccaactaacgaactactttggatttggtgcaaccggttcgatttgaacgaacgacccctggactttcaaaccagtgctctcaccgagctgagctacagttgcgtaattcgtgcctgctcctttgaatcaagaagtccaccccggtctttgggtctttgcagtacatcacgctgctctgatgtttggtggaacttgggagactacgtgttactcccctcacaggccgggattccctgctacccatgatgcttaaccgattagctgaagtcccataatgtggtagaccgcccgagactcgaactcggaacctatcgcttaaaaggcgagtgctctaaccattgagctagcgatctatggatatgttattgttactgcaccgttaaagagctgtaactcccccgtattgcggagatgagataattgaaagatatttaagttatacttctcagcaacttcgcccatagtggagacgtagaagttaaacccccttacgtctactgttaccacgtaatctttatctttcataagtacctcgatttggagcaccatcatggattttaaccatgcttcgagggtttgcaagcctctgcctagtcactcggccaatgatgcattgtttaattagggcgcaccggagttccaccgattgctaacgcttcaccgcaacctaagtcgctgttcttaccctaatactgtattactgactaggattttcacctagacggagttagcaccgtagcgtgtagcggcttacctctccaaaccgggccacatctttcaatttcggtggcagtgttcctacgcgtgcctgagttaattaaataaccctttcagtaaaattggcgggagaggtgagattcgaactcactgtcattcgcttaacaggcgaccgcctataccacttactgcttctctcccaaatttgttacaactcaatgagtcccgcatgaaactctctgtgacatctacaacagagtggaacacacttttcaagttctgctatcagtttttctctactgaaattagagcctcgggcatcacttagtacaaaatctttttcgtttgggtctaaatggtgaaagtcaatggcagctttacacttatcatacccacatactgcgcagtctagaactgggaatacttcggctactatagcatcaaacctatcggctctatgggttagctcacatattttgcacgttggcttccacttttgtttaccggatacaggctgtttaccattagtccagaagttatctgttgttaatgggtaacttacgttacacttattacacgtctttaattccatttctataccttaattggtgcactgaggtggactcgaaccaccgaagtcgcgatgacaagggatttacagtcccgcccgtttgccgctccgggaaccagtgcgtatttgaagaagctctcataagaacctcttcaaatacctcgtcgaaacgagatatttgctaacttattgtgactagggctgacccttgtgtccgaggatacctctagacggtcatatctcttagcccagagagaatttggcgcggctaacgggattcgaacccgtggctccgacgtgacaggccggtatgttgaccgctgaacaccatagccgcttaatttgttattccggttcgtactccatcagatcgtctgactcacatgtcgggcactcccaatggcattcacttaactcaccgcaatcggaacaaatgtacatttttacttcgttttccatttgcttttcctctttcgtttcaatataaatattatactaaatttcagagtactaggcaaatgaattttttcattaatcgtcttcttcgtcccacgagagggagtgcatgaagatcggtagaactgtaggttctacgtcaagcgacggatagaagtaagttttaccttgagacaggtcaatgaacgtgggagttctaccctcctgcatgtgttcatcaaccttgtctagggcgtcgtttaacagttcgaagcagtcagtattcgctccgcaaacaacgataaaatccattaacgacccccgttcggaaaaccggaagcaagcaggaagcgaacaacgtcttccagcgacgggccttcgccatcttcttcttccagatggaagggcaggatagcgtactgcatgtcagctggtgctatcggggtaaaggtaggctctgcgggagcttccgccatgaacactgcggttccgtcaaccagacgatcgatcgcttcacagacttctagctgttcttcgatcttggcctcgcgttcgcgcatcagagccagcagttcagtgcggtactcttcgatacggcggtctagagactcgatgttattggacaggttatcctgtacaatcatcaggcggactacagcagagtttccattagtaggacgtgtgtacatagtatttcctcagttaattgttaaataaagtcaccggtagaaactaccagtttaatgcttttacggaagatttccttgtgatcgccttcggctcgatgcaccataatggtgccaaccagtttgttaatctcaatttctacatctatgataccgtagggcatagcatgctcatcggtaagcctagtccatagttctggctgaagcgtacagctataaaagaccatccattcgtgatctccgtcccatccggcccaatcaaccaccagtgcagattcaataccagttgcagtaatcttttccatttgctaactcctctcattaatttatgtaactattataccgtaaataagagcgtttagcaaataaatttttgaattatccgctccgaagagcggtaatccaggcttgcagctgttagttacacttggttttagtttgacgacggtcgcaaagggggatctgtttctttcgaacgatagagtaccctttacgctgcgacagggaatgaaggttgatagccttcccttttctgtaactaacagtccccaacttgtttttaacgtggatgcttggggaacggaggaaccactacacgctaaccccggaagggatcgaaccttcacaagatagaccatttatctcagcctcgttttcgggtatcttatgcagagtggatgttctgcttacgccctttaggaagccccgtataccgattccggcacggcatcaacgcgctagggcaatgaccgtctaagtccctagattcgccatttatactcctggacggcatggagtcgattccctagacttttacatagcattgcgctaaaacctgtgaaggtaaggatggggtattcttacgaatctgggatcgtccccatcagaaattacagcttctcggacgtttgacggccctgacctaagtctcactgtaaattggtacttgctgctggtttcgaaccagctaccctcgccgtgtaaagacgatgctctcccgattgagctaagcaagtatttggtggtcaatagtggactcgaaccactgtagtctcacgtatgaagtgagtgcataaaccatctctgccaactgaccttaattggtactccgaactggactcgaaccagtgacctaacgattatcggtcgtttgctctaccaactgagctatcgaagcattattgttcttgctgacggacgcagatttcctcgtcctggtgtatttgagctattctagcatcttcctcagcttccttgtacgtgtcatgaaaagccggtgcccaaaatacgatctcttttgtgtgggtattaattagcataccttgatagcgaatcatagttaccccaacgtttaccgtttcgtggtgctcctggacgtctagcagcctctgccattcgtttcttgattttagcaatgttctctggtgtttgttctgacttgcgtaagcctgtcacgttacaccagttatcaccatcccaggaagtaattagcattactccagtacctagtactcgttctgtgaaagagattttcatcatcttctcctagaattggatgctccggcaagattcgaacttgcgatctccagcttatgagactggcgaggacggcctctcctctacggtgcaattggcaggggcaacaagaatcgaacttgtgacctaaggcttcagagacctccgctctacctactgagctataccccaattatgcgcactctgctgagtacaacgttgtgtctagggccagaacataaatgcttgcatttatgggaggcggctagaagagggatgtgacccagagggctaacctcgtcactctcagcagagattttatggtacaccatcgaggaatcgaacctcaaccatagagttcgtagctctatattctatccattaaactaatggtgcagtaatctggagggatatcttggattcgaaccaagatagactcgatccacaatcgaggtcattatccagttatgataatatcccaaatttgagcaccatcgagggctgatcagacctccacagatagaatgcacatcgcacacactatccggttagaccgcgtattggtacgttgcacttcgcgcagcatattatcccaacaggcgactcatcgaacgatgatactcaaatttggtggccctaagaaactcttcccactcacaactagttgattacttctggattttcgcccagaaaattctctagaaaggggcaaccgttactcgtcgggccattatttggcggaaagcgaaggacttgaaccttcatgcccttgcggactcatcattagcagtgatgcgtggctaccgtttcaccagctttccaagtgtttggcggagaataaaggaatcgaaccctcaccgtttccgatggcgactgatttcaagtcagcttgctcccatgagcactactctccagttagtatttgttctacttctttgcgaagttcatccgggtcggcatgatacgtaatttcccagacgtacagaactccgttagcacatgctaagtcgaagatctcgctttccggtagcaccagtcccatacacttaatatgaaactctagagcttccttactcggaaaggtatggactttacggaactcatttgtcttacgatccaactgcatgatttctatgttcatcacgaactcctgttatttggtagggatggagggggtcgaacccacacggatatttcaccactagaacctaaatctagcgcggctgccaatttcgccacatccccatttgtttggtggagtcacagagattcgaactctgctgctatcctcggtgcaagcgaggtgtccactcctagcagaccctgaccccaataatttgttaaggcaattaatccggtgcgcgtaataccctgagcaattagccatgcaaggatacccgctcttcacgaatacgatacactctacgcttaccaggcgtttcggagagtcactccgctattcttgcgaaccctcagtacaatgaccgagcaagctgcaagcgtgttttttggtgccgactctgtatcagattaattccttaacaaactatataaatattatatcaatttgttaggcatttagcaactgaatttttcagtaaatttggtactcccgacggggttcgaacccgtgttcccactgtgaaagagtggtgtcctaacctgcttagacgacaggagcattttaaatttggcaagggaaggaggagttgaacctaccgatctcggagtcaaaggccgatgccgtaaccacttggctattccctttcaatataaatattatctcaaattctaaagcatttagcaattgaatttttcaagtattttggtagtgacccggcaacgcaggtcactatgcaaactactcgccgtggtctacacgaatgagcggacaaagtttgtccttcttatagattctcatcttctggtagatgttaccgaagcgaagctcttcatcgcgagcattatactctttctgtgccctttcgaaagatttactcgcgttccattcctggatccgatcccctatcttagcgcaggcccagccgatcccggctatcgccagcagaatcgctactatcgtagatagtcctgctagacttaaccctacaagcatgtaccagggagtaattcccagctcaaaggtgaggcccaagaacgtagataagatacttcccatccccaaagagaagagtacagcaatagcagttacgccaatctgtagcaggaaataccacactgagtgccaaaataggctacacaaggtgactctgttgtcgttcagccgataggtgaaagatgcggaagagaaattaagccacttgtagaaaaaacctttacgtttaatattcagcatatttagcctattacttgagttgattgattagaaaaacttgtagcgcaataatgaatgcggcataggagtcagagcctttaccaccttcgttctcattaacttcttttagtagggcttcaaaagctgctttgtgacgctcatagtgccctctgactgtcgggccagcatcctctaacatgcctagaagcatatagtactgggtttgtaattgggcgtccattagtcctcccacacgattttaatcgagagaagacgatttacaggaatgaccagcatagtctcagaccgtttattaaggatttccaggatatccccatcacgatggagcagacgtttagggctgatatctgttactgtggactctaggacgataccattatcatccacaaaggatacgattgcgtttttagtagacattttagtctcctgttatgaaattggtggctcccggaggattcgaacctgcctaccttccgcttatgaggcgggtgctcatacccaatgagcttgagaaccagagaagggctatttctagcccttagttagttatactgctgcttcgtcttccggggtgccttccaccggaggttcttccgtaggggtatccgctaccggaggttcttccgtagtggtatcttcagccggctcgggatcctttacgaaacctgcttcttcgtcggagatcacgtacagatcctgaatatcttcagtattgatcatacgagctacgctaccgtctttatagaagacggatttggtaccctcgttgcgagccatgtttgcatcaataaccagttccgtcagaacacctttctttaaatattcgattttaaatgccatgttatcctctactttctctttgatttaaagaactattatacaaaatttctgacaaaattgcaagaaaaattttgtagaatcaatcttaatctgcgccctgcgggctttctgccgctgcccactgaatattacgtgtgggcagcgattaaagtggtactccctacaggattcgaacctgtgacccacggtttagaagaccgttgctctatcctctgagctaagagagcattaataaagtttaagcgtttttacaaccagatcgtgaacctgttcagaataccggccaacgctcttatgcagcgactctttaaactctagagtacgcctggcgattagctgtttttgttcaggtgtcagattaggtgctggacgttcatacggaggagtatgcacagatgccaccattattataccttgatagagtttttgagacgatcgcattcagcggcgaactggacgtttagggttttgattgcgtccgtacactgatctatttgtttgtctagagctttgataagccccagcttcaccatatcgtaacacggtttcatttcgaaagtgtaatctagagtctggctgccacataggtcaaacttaatatccccggcttgcaatgtgaagcgtttctgtgtaccaccactgatgatttgtttagccttagtcagctcactacgacgagagaccatagactgaatatcagagcgtatcttagttaacatacttaaatcgttcatatagacctcgtcaattagtatctttaagaactctcgtaaaagctcttaaagataccgccagtagcaggggacgaatccccctattaagcgtctcattggtacgcactactgtcagacatatcttccagttatagtcagggtgactaatataaccccacatagtctccacagcggggcacactccaaacaggggcacttctagcctgtgtaagggtgctataaatagtggttatgctttcgctcggggtgactccggtcatgactccattatcacatgcttacacagggtatacgagcttccgcggagctgtatactcaaccgtgtcccacttaggtctcggagcggccgtttgtacgaacggctatccgagtactctttcccacttagaatcaggcgagatcccacctcgccaaagttcatacgatcatcgtgccgtatttaaggattattttcgtcacttaaaggagagacgtcctccacgcggtctgttaaaatcacacctccgaattttcgatgtgaagttttgatagcttgaaaaacgactcctcgtggaggaaaaacttcactatctaggctaccgcctaaagttcttcttttgatttgggcatatatcaggtaagggtagccaaatcagcatcctagtccttcgtggtttagctgtttcgttcccgcgagtctcccaagtctttccctgggaggggaggaggtactccagcagcgagtggttcgccaatagaaccatcagttatctagctctttccgaccgcaggacttgaacctgcatcttccggcagttacgccatgataatgtccattatactaggacggcagtgttgctacataagtgatttcgacaccccactatggcggcaataaccagcaccagacgctatacacatgtctccaatttgcagcctaggcaggtcagtgtgggagctatacgagtttctcaggctcagctccccacctctccggcaggccacgcaccatgcttcattctggtcgaacaggttaaagtgagattccaccattttctataaatcaggagaagagtttacgagactccgggacagctcccgagttttacaagagatctctaacctacgcccgtccaatacgctccctggccggtacccggactggatgcacgaactttgtcaggtgatcactcttaactcaccgattctattcaacgaatcttaatgctcgacgagccttacattaaaacaagttcagcgtaatcggcccgctgttctctctaatttatgaaactattatatcaactttttaagcattaggcaactgagattttaatttatagaacacatggttgccaattttacttgttcttttgaagtccttgtcttttgtccagtaaggtttagtatctttactgtgaaagtacaaggctcccttcgtcggatctactggaagatccatatagtaaactagtctagctatctctttagcttgtttccactcttcgtctttgcgatcgagtttatgtttcttcttaccaacccagctgaactgccctggttgatagactactttacaatatgtggacgggaattttccatagttaacacgatttttcgttacttgtgcaactgcggtcattcctttaactccttcccctctagcttcaaagtacgcatttttagctatgcactctatctcatgcgcatcaatctttgcctgcgcatggaagctagtgaggatggagatcattagaatggctgctttcattatttctcctttactctttgattcaagaataatagtatatcaagaaatcagccatttagtcaaatcaaattttcaatttcgattcgatagttttaatacagtacgcttctaccagggcgtcaaacaccggatcatgtttcgacggatagaccccctcaggaatcaggttgtaacgctcaattacgtcgtgtgcgtagatttcagcacaacgtaccaacgctttccagtcccctccgagagcctcgaaatagtcacgcgggttacgggcgctagagatatcccagaatttccacggaacgattgcaggatcagacggagagaaaacattagcttgagccgccactgtttcgtaaatagacatatcgaactgcgggccattgccatagtggcgcagagaacgagtgtcgatgccctgctcgtcgataatgccttcgattacctgttttgcctctacgaacgggcagatcagatccatgaacgtgtgcttggacacaggagattcatgagtcggattgcaaaccagaacagtggactcgccgtctttagcgttcagagcttcaataatggacagcgacggagcactaccagcactagcctcattcatccagaatgcaatagttccggcggagactttagcaccgagggccaactgctgggcaacgttagggatgcctagaacgatatacggatctaacgatagatctttcatcagtacgaaagcgaaagacggcatagcgataaaggtgctcttgcaatctcccggagttcccagggattcgatatcacaaacagagatccagcggtcttgtaagttttgcatattgtttcctttgttattaaagttgcttctagatgtgttatcacatttagaagccacctccggtggtggcttagtcatatcttcggacacatcccagttttcttccatcgacggccagttagccgcccaatcttcgagttcttcgtagcacgaatccatcagttcccgggagttgaccctagagtaatctagggccgacttatgtgtcgctgcacgattgaaatcgtttttagctacaaaatttcgcattatgccttcttagctggtttgcgtttttgattacggggcttatttgccttgcccgtaaatttaatacctacgccgtagcacagagcgcgaacattctcacggctgtattcgcagccaaagatattcggcttgacgctaccgaaacggccctgggtcttgcgcaggacttctttggtgtctgccttatccggcgtactccaaccaacgatcttggagacgtagccagaggtagaacccttagttaccggctttttacgacgcggggccggtttgcctacagctgatgctgcttgagtatcagtcggatgtttacgcagatgacgctccagacgttctttgcgattcgcttcagttttgggaaaagttgcaactttggtttctactgcttttttagaggtctgcttagccataatttatttcctttgttttgattggtttcgttaatttatgaatctattatacgttactttttagcgtttagcaactgcgttttttcattttcatctacaagctcatcgaagatgatgtactcgtacctattaccgcccgatgtgcttcgcttgctcttccgagctgatgtactggtacccgcctttgttgtacgctggggcggtacagagtttctttcgctcaatttctttaagagcggctcgttctctttcagccatctcaggatccaggatttcccgtgcctgcggtcttggtggtagacgcgtagagggttccccgattttgacgcttccagaaacgcggcgcagagatcgagctggtactgtggtacgtttgggaacaaatccctcaaatctggtgccattataattcatccccacccctcagagctttccactccgcttcaaagatttgggcttccatacgtgcgattcgcagtttcattactactagatccaccccatgctccatcagcagcacttcatacttcattttactaactaagcggcgtaaattctccaacatcacatatcctccatttccagttcggtcatgcgaacatttagcaggttatctgcggcctcattaccttctacaccggagtgacccttaaccttaacgaaagttgggatctcattgtggtttagacgatacttcttgagttcgtcgataatccacttccactggtctaagttcagaggtgtctcaccgtctgccttcttccagcctttacgttcccagccccaaacccaggattcacaaccattcttaacgtaggtcgagtccagatagattgtcattggtcggccagggtttttgttagaccatagcagagcctctaggactgcttgaagctccatctcgttgttagttgtgttgcgtttgggagcagacttggtgccgatttgctcttcgctggagttgtaaactaccatagcccaagcaccaacgttgtctaccccacgggtattaccacggcaaccaccatcagtataaacatgaaacattacgcgttctcccagctaatagtgatgtagtcagtatctctctggtcgaaagcctgatttacccggacctcgtatccagattgctctagatcaaggattatttgacgacgcggggtaactgctatgccgtttagtgcataggagtctacttctgtcttaccggaagtagcggcgccatcgatagcggagataatagctcttcgagccgaagtcactgctatatcatttgcccgtttggctttagctgccattgcttttgcatcagtaaaagacatattcatttcctctctcaaatttatgaatctattatattaaaaattcacgtggtttgcaaatgaatttttaatataagtggcccgaaggccacctcaattacagtaatttagctggaggaaccagtaagttactattatagtcccgcttagctggaggattttcttttggaggcttaggggcaaactgacgcattagtgcgtccatgcccttgtactttaccatccctaggataacatctatgtgtaatcccgaggattgaaccagaaacttcagctgagactcctccctttcggagaaggttattttggggcgtctgttaaataatcccataagtcctcacgctgtaaacggatatgcaatagggtcatgagacttatatcccacgattttaaagtcgttcttagaaacccaggtgagtacgtcctctagggtttttatttccgggttgatctctaggcgaggtgccgggaaaggtttgcggtcgaattgaccatgttccatgagaaccttgtactgattctcgtagatgtgcatatttactatacgctggtttgctctgattgcccggttccctgtgatctgggccataagcgcgaggaacgtgtagcattggaccatgttaaaggcttgccccaataggaagtcattggatctctggaaggagtcgagatacagatttccattgagtagcgagaactggtgggtatgcatgcacggtcgtaagcacccttgatcaaattcgccagggttccagaaggtgagaatctctccgcggtcatcaatgcctcgtcgtaaattctcatagatcttatagagttggtcaaagtgggaaccatccggtcgaagccacgttctgccctgtactccatagactctacccatatcgtcggttccctttctgttagggttgaccagccacgcctcgttttcgttggcgttagcgttccacgtattgcagccgatagcacggaattgctctgcggaatcatatcctcgcagatatccgataagctccatgatggcctgaagagcatacgctttacgagttgtgataagtgggaatttctttccgagtacatcatattcaaagtttgaccctattacggttaaacaacgaacccccgttcgagggttctccagccagacaccttcttcgagaatgcgtttgccttcattaatatagtgaatcacagatatactccttccataacaaaacgatagcgctcattttccccagaagctacatgagttactacagcatccggaggggtggacgtaagtatcgggtgttccagatacatgatgtggtctaggcttggtactgtaccagccttaggataaatggtggagcgataaatcgcatccagacagcccatagttgctagagtttctagcaaagctttcccgccgatgcagactacctcaacttcattacagaagtcccgaattttggaacccaagtgggtaataaaccgcacattacggggagggttttttatcagaattggggatgccgaacctactacgtacaccatggatttcttctccagtgcctttttcagtcggggaggggccgttgtgtaggtattatgtcccagaataacaacctgataggtatccaggattttgtagaactgttctagctcctcggggatggagccccagggaagtttcccgtaggcatccatcgtagcagggttgaacacaccaaaggctccatcaactctcattgcgtataaagctgtaatcattacaggaactctccaaattcgtcagacagatcgtccgggttagcctgagaggttgcaccaacacgatagttggtaatctgtgcttcttgcggagctacttgctggttcttggtgttcagccaacctttcatccagccaataggatcttccataattaccgggagatcttccggccacggaatgttgattgccataaatgccaggcgtgcgttgtagtacaggtactctaccagcaaatcggcgttcaggcctggaatatcttcgccttccgggaaaatataatgcgcccagttaatttctgtctccagaatactgcgcaggatcttcggagcgttagcctgagctgctgctacaacatgaggaggaaactctccactctgtataatacgcaggacttccatcgccataacggtgtggagcgcttcgtcttttgcgataagctgtaggttcttagcgatacctgtcagaatatcgttctccgccagagcaaaggtacatgcgaacgaggcgtagaacataatggcttctagagcgtatacagcgtagtagaactccaggattttctgctgtaattgttcggtaagtggattcagatcagcatataaacgatctgagatctctttaatacgtacctgttcctccgcaatttcgtttgcaaggaaggatagctctgccttttctttatcagtgttatcaatgctctctaacgcattatacttagaaatgcagtcattaaggttctctgaagctaactgaatagttgcttctacatcctcacgttctttcagccagatatcagcaagtgctgccagctcgtcaataacagaaaccggcagtgctaaacgtgcgaatgcttcgtcgttagcctgtacagtcgcaatgaagtcgcccggattagggagaacgttgcgaataatgttggaatacgcacggctgtgaatattctcaaagtaactccactgaataagcatgccttccagctcaggacgagataccagtttcaaaatagcatcttccggagcacgggtgataatggagtcggcttgagtttgccaggctaagttcagcagggtcttgtttttaatatgctgaggcagattaggccattgtttcttatcggcttccagggagatctcagtctcaacccagaactgcgagcgttgcagtaacgctagttcctctagacgaggatagcgaacgtttacatagtcggcgatccccaggtcttggcccaggaatagtttagactcagtgtgatcccattcgcggttaaatactgttgccattgtttaatttcctctctcatttaatatacgaatattataacaaaaaatccaacctacttgcaaataaaattttgctttcggttggatcgagcttaattacagagtacaaccgccactggaacaaccctgctctgctgcagagcctccggtatctacgtcaaagtttgcgtagtagaggttcttaatcccatatttagtggagttaaggagatctttgataatctcagtacccggaataatacctccaggatatttgttaaagtcgtagtacaggttggcactaatagcctgatccgtgaacttctgcagaaccgctaaccacttgatgtgctcagtacggtcaatatcgaacgcatacttataggactgcatggtgtcccaatcgtctagacccggggctacagtgattactttgttaacgcccgaagtcttgatagttactgcacttcgaggaggctctactgcgttggtaacaccaatcagtacagagctagactcacccggcatacttgcggttagaacggagttacgcataccatgcgttttgatctcttcgcggagagactcccagtccatttctagacctacggaaaccaggtcatccacagtcttcttgtaagtatcgattaagagcgtaccatcagaagtatgagtacggtggaaccactcacatgggccgatctcttttgccagacgtacagacgctttgtgaaggaagaacgatgccttctctgcctcacggtggatccagttacgggcttcttcgccttcgaatgccaggccttcagcggccattgctcctgcggcgttcatcagtccaatacctacgttacggcggcgcaatgcagtgtatttcatagctgggaatggatagtgctgaatctcgatgatggtatcaacgaacttcaacaggatgtaggagatcttctcccattcttccagggttttgatacgacctagggcgaatccgcctaagttgcacagagatacttccccgtactctgaaacatccattttgtccagttcctcgtctgtacggtacagatctactacgtgagggattgggaacgttggctgtacaatctcaacacaaaggttggacatacgcacaggatctttgtaacggctgttacggttcacttcaccagcgtccatagtgtacaggcggccagtttccatacgtacagttttccagaactcaatcagttctgcggcaggaatcaccggggctacagggagaacttcacccttgaaaccacgtttggtaacacccgctagacgtttttcggctgcgatgtacaggcgttcaaattctgctacattaccagagtcaaatgctgcgtatacttctggagcgtacaggaagctcatcagtgtgatgttctctttacgcaggaagcgtttcaggagaatactgttgaacttcaggttgtagtccatcttatcgattttcttttcatcaggggaacggttgctcttagcttccattatctgaataatttccggatcgaaaaacgcagtgtaaacggttgcagaaccgccacgggactgctgggtgttagcttttacggagcggtcgatgtgtcgataatatggcagttttccagagtgtgggaacgcgccttttcgcaccggatcagcaattgatctactctcaagatgatagccgatccctgctcgggcagcgaccattttgaagacgacgtgctctgctgcgtcaatggagtccagggtgtcagtaccatcaacaagacagcaagaagcgaagcccctgtcagcgctccgaaggcccacgagcggcggagttgggacgttgattttctgtagcgacagcgcgttataaaggtcgattgcatcgagcatactccagtgaggttgagaaagcattgccattgccatacccatgtaggcaaactgcggagtttcatagatctcttccgtatagatattacgtctagagtatttatccatgaactgcttcagaccagcattagtgaatagttcgtcacggctgtggtcgataacttcgtttagagcttcaaactggtcgtcagagatccagccgctcatatcttcccacgctcccagctctaccatgtggtcgtggaagaaacgcagagacggcggggtgtaagaatcaaacaggttcttacggagctgggctaaacgcagctctagggcgaatcggtcgtaacgatgatcacgctcgatcattgattcagcagacttaatcagcattgtttgcagatcgtctgagtgtacatcacccttcggtaggttcttaactgcggctaccgctaccggagaccacggcacatcgcttcggataccgatgtattttgcccagtcattcagcttctgagccatgaacggttcttttgtaccgtcacgcttgataacgtattcaatacgttgggtcattggtaactccttttggaagttgtcaggatttaaaagatattctactttgttttcggccattttgcaaatgagattttacagacaaaaacaggcaacccctttcgaggctgcctgtgtgtcggtctactttaataaaagtgtaattttttcattcgactaactaactctttagtaccgaggggttggttaggaaactcgtttgctatcttgaaagcggcatggtgtcgccgctcatcctcaggatagttagcattgtatttattgactgttgccagggatactggatgcactttcgttttacgagtgcggaagttgttcagtgtaaatacgttgttcatacgcgctcctagagttagaggtcaggacgttcgtcgtgagaagtgataccttcaccgaagcctacaaagccccagttttcttcagaggtaataccctcaccataaccaatgatcagttcagtaaccatattagattcccatatcgttaaagattgcctggaatgctttggattcagcggaacgcacgttatcatgcaactctactaaggagaatggcacatgttcgtactgatcgtagatatccatgatcagttgcagaccagaatcggatttaatgtctttctgcgctacgtcgccacagattactaatttgcaatcctgacctacgcgggttagaatacacttcattgcttctacggagatattttgagcttcgtcaacaattacataagaattgttgaaggtacgaccgcgtgcatgttcgatagcaagatattggattgccttgcgttcaaccagcccctgataagaacgttcccccaaggcccatttaaagccatcggcgattggttctaaccacggtgccattttctcgttcagatctcccggcagcatccctagggatttgccaagaggttcgttaggtcgaacaagaatgaacttttcgtacacagaacccggctttgccaactcttgggcagcgagaacagatgggataaacgttttacccgtacctgcttctccaataccaaccgtcactgtaaagttacggatagtgctgatatagtgtttttgctcagcgttcttcggcttgagttcttttgcggttggttgaaaacgctcccgtgcttcaaaatcaacagggatgacgttttcgtgacgttcacgttttgcgctaccgttacggcgcgactccttacgacgtgctgcttttctcattgcgatctccttagaggtctacagagggtcaaatttcgaccatgtttatcaatttagaataccagtataccaagttttgccgtggattgcaactgaaattttctagaatgatacggaggacatatcctttcctttattcgcgcgatgcgcgggcgcacacgaataatataaaatgggggagatagacaaataaaattttccggtttttattgttttgatgatccagatcaagttactgttgattataataaaatagggttgacatagttgtgtctatttgatataatatatgcctaactggaggaatatatgaacgaactagacctgattgataatatctatagtatcctcgataacgagggtgaagaagaccttatgtttaataacgcgaataaggcaagcgagcagtttcctacacagagagacatgatagctggagaggtttctaaatatgtggtagcacaggagcttccggcatatctcttggcggcgcataatagaggagagatacacattcacgatatggactaccgagcacaggggtatactaactgctgcctggtagatttagcggggatgttcaagaacgggactaaaatcggtggggcagagattgaaactccaaagtctatctctactgcagctgcggtaactgctcaggttatcgcccaggtaagctcatgccagtatgggggtacgtctatcgatcgtattgacgaggtgtttgctccatatgtccgtaagtcttacgataagcacttagctattggccagcgttggctgcacgatagtaagaaggctgcggtatacgctaccgaaatgacggagaaagaagtatatgatgcttgccaggggctagagtatgaagttaacactttattcaactccaacggtcagcagccctttgtgacatttggattcggcctaggggaatcctgggaggcacgtatgttgcagaaagctatgctggaagttcgtatacgggggcttggtgcctcaggtcatactgctgtatttcctaaacttattttcgcagttaaggaggggctcaacaagtccccaagtgatcctaactatgatatcaaacagctggcgcttatctgcacttctaagaggatgtacccggattacgtgagctatgaaagagtaacggctgttacaggcgattttaaattccctatgggttgtcgatccttcctttcagctattgagtctggggaaaccgctgggcgcaataacttgggagttgtatctattaacctgccgctagttgctgtagagtctgagggatgcttcgataggttctggaagttgttagacgaatacattgataaggcgatggctgcccacgattgggctattgagcggttgaagcgtgtgcgtgctaaacaggcaccaattctctatatgcatggagcctttggtgtaagattgaaagccaatgatcttgtatggcccatctttgagggtagggcatcagtgtccttggggtatatcggcattaacgagctgatcgaggtaatgtttgaggataccgaccctatgtctccacctgcggttgaattttcggtacaggttctcaaccacatgaaagaccgttgcaacagaaaagctgaggaaactaatcttggattcagtctttatgctactcctagtgagtctctgtgcaataggttcaacactaaaattgccgaacagtatccggaatatgactggctaacggataagggctatctgactaatagtcaccacctggatgttcgcactaaagttgcccctaacgtgaagtttgactatgaagctaactttaccaccatcgccaatgggggtaacatatccttcgtggagcttccggagatgcgtaagtttatctctgcactagagtgggttgttgactatggattaagtaagtctcactacataggggtcaacattcctgtcgatgaatgtgaggagtgtgggtacctaggggagtccgtatccggagagcacggttttgtatgccctcagtgtgggtcggggaatatctcggttacccgtcgcgtttgtgggtacttgggtagtccaggtagcaggccgtttaaccccggtaagcagcaggaagtaatgcaacgggtcaagcacatgaatttgaaataaatcacttgctaaacacctccgtttttgatatgatagttgtaattgagaaacggaggatttatgaaaatccataaaactgatgaaaagcgtatctactttatgatggactctggagcatacggatctatttcccgagaagacgtggtaaaacttctgcgatgccgtaaccacttgtggaaagataaagtcgatcccagaacctctgagtgcttgtccgaaaaggctgagcagttgcggaaagaagaaatgagaaactatatggagttcctgtaatgcgtagattgattatcgtaagtggtgctggattgagtgctgatagcggagtgccaacgttccgtaagggtgccatcactcccctgtgggataaatacaagctaaccgaagtatgcaacattcaggcattcgataaggggtttcactatctggacgaccctatgcctccgttagaagccctttctgagggatctgatgatgagcctagtcgcaacctgtacgagctaactcatgagttctacaacatgcggcggcaggagctaggtacggtggagcctaacattgctcacttgagaattgctgagtggtataagcgcttccctggtcaagtcgttaacttcaccactaacgtggatgatctgctagagcgtgctggcattccccatgatgatgtgatccatgctcatggctaccttacggagataatgtatcgccgaggtaaggatgtgatcgtggaagatatcgggtacactgcggttgattaccgtaagtatgagtgggttaagcctgcaattacgttcttcggggaaaccgctccgtggtatatggggcagattaacctgtttgataacctgacaactcaggatctggtaatcgttgttggtgccagtaaccaagtaatcgactttaattgggaactattcccagcccatagtcgaggtactaaggtgtgggtggtaaacaatggtattaactacatagagcagagtttgtacggggaacgtggaatccctgtctggtatgatactgctgctaacgtgttcagcaacaaacatttcataggtcaagttgaggcttggttggaggagaaaatttatgtaccatcccgatgatatcctgttatggcccaacggtagttggtgctaccgcagtgatataggtgacatgggtcacttgtctgatgactatcagatcctccgtgccgactctgagcagtggcacgaattcatccaaatgggagaagaatatgctggtcaatgaaaaggttgttaatcaaggggttgggctagttccctgggctgaaattcctctggacgtaaaagagtctctgctggaccatcttcgtgtgtggtgcgataatatggaggtctacttcgactatgacaatatgcacctaggactgtgggttcctatggacgaagatcaagatgaagtcctagactggggcgatctgactgagatggggctggtgtttgcgctaggctatgtatgtcttatgcgtgagtcctatatcccggttggggttacaggtgtttcagcaggtatttgggtcggacgtaatgaagattattatgctccggaaaatattaacggttggatccaggtgctgcgtcgcttcggtttccaagttgaagggttaactaaatgagtattcctaaaatggaacgtatctcctgggcggatatccccaaggaattgattgatgtagcagagaatttgctgcgggccgcgttgagggacgaggagctttgcttcatcatccagcatgacgtgtgtgttggtttgtctaaaggtagtttggcccaggattatgagatcctctttgattgggatgacctctcggatctggggctaatggttctggtaaacaacgttgtgttccaccctgctaactttgcggcattccgagagcccggggtgggtatttctccggggttcttagtagctgaggagccttggacgtatgctccagaggttcttcgtgagggcaagcaaaatgcctcttctaactcaattaatattatgggttggaatgcctagttgggagcttagaccaggggattttcctctggtcttttctatgcttaaacccagttacctaccacgtatttaaatattttacttgcaatctcgccacgatttttatataatatattcataggttgagagaaatgatgtgagttacaaaactgacataattcctctcattcacttccgagcatacagaacagtccggctgctacatgcttggttgggtttggcttattggaaaattgattccgaacggaattatagataattgatctagaatgcgggtaagagaggttggcatcgcgaggctctcagatatttgttcgttagtcatgtggagcaaatagcaccgcggtctgaaatgaccaagaagtgaagctgtaagtagcaacgtacctctgcgcaatagcgacgaataggggtcaaccacatggagcttagcggcgattacatgctgtgtgggagttgtgcgaagcggccagttctagcaatgaggaagtgaccacccctccatctataaggaaatttgttgagtcagtggacttttaagctgttctatccttgatagttcgagatcgctttattcttcaacataggagaaaacgtaatgttttctattctagaaggacacgcgggtttttcccgcgatcccgcttccggcaactggaaggaagtgaaaacaactgattacctttttgcgaaggagttttctaacgagcatccagaaggtaagccagcctcaatgccctacaaatttaacgtagtggatacggttgaccccaaaaatcttaatgaagcgtatgagctgatggttcagctcactcaagatccacatctcgtagcagtacgaggtacatgcttagttgcagagaaggccgtgcgtcgtaaacgtactaacttcaaaatcgaccataagagcaatattattgctatggacgtcgatggaatctctgatactggaggctgcgacaggtttgacatcgtgggtatgggacgtcatgtcattaagttattaaatagcatcagcgaggacatgttcccgcttaacgcagggtttattgcccatgcgtcgtcctcggctggaattaagccagggattcgtatgcacatgctattagagagtaatattcctgttactcagggtcagttaaagtttctgtttacgtccctcaacgatagctctcggcagaagtatggttttgatattgccgacttagcttattattcatctgtacagcttcactatttcgctgacccgattttccgggatcagtttaccgatccgtttaaagcggagggtaagccacgtctggttaaagttaacggcgctaggattgaactgcccagcactatgccagattacgaagccactcgtggggaatttaaagaagaatttctgtctttgctcaatcagattaaaggcaaacgtgtagcctccgagaaagtggaacaaactattgcagagctggaagaagcagaggatggtgtttatctgcgtattattcctaaactgtaccacagggcgctagaagacggtgttgatttcgcgtggcttgagaaagaaattacttcagctctgtctgattatatcaacacgaaggataattcccgtagcctacaggattattttaataacgggcgtaagcaggcgttaaaagcgtttgtgaacaactctatgcgagatattcctgagtctaatgttaaaggcgttcctgtacacaagttgacctctgatagccccgatgggatgaactatttgaaaatcaaccgtccaccgccggaaggtcatctaacgtttatcaaggcttctctaggcactggtaaaaccaccgcagtgacaaagtggctagagcgtgatcagctgaaaggtaatttccttgcagttacgaatacacgtgccctggtttcatctaacgccaagaagtttgaggccggacagtatgataagtccgtagatatgttaaacttcaaacgcggtgctattgatcgtatgtctactactatccactcaatccacaagtttaaaaactttgttgggcagatcgatgttatctttatcgatgagtgcgacgcagttatgaatgatctgttattcgccccagttgttaaacaacgtcgcgaatgtatctcagttcttcgtgaaattctgctatctgcaaaagtcgttatcttgtctgacggggatatcagtgcggagaccattgaggcgtatggatctctcatagattttgacaagccggtctcttattataagcatcatcgtaagatgctatcggatgctcaggcgtatgagttcccggatgaatccagtatttgggttgctctccaaacgtccctagagatgggggagaaatctattctagtgtctgactgcgggccggatgagttaaacgagaaaggcctaacgttgagaagcaataccggtgcgattgttaaagagattcactcaaactctacatctgacttagatattcgtcgtatcttggattatacaacgaatgagttaattgagcagcagattgattgcctgctgtgtagtccgtcagtaacgagcggtgttgacttcaactacttcgataacgtgtttgttatcactcgtaccgctaaccaggcgccaaacatgcgcttccaggcaatcaggcgcgaccgaggagctaagaatatcttctatttcatcgataagtccaccagcggattctctgcgggttcggagcagtataacatcgatgagggttggctagaattagcccagcagctgtatgtaaaacgtcgtgagctagaatcccgtaactttatcagcacattacgatactatctgctggatcagggagcaactatcgatatcttcagtgaaagctggggtaagattgatagctcagccgcagagtatactgctgaacgagtttctgctattttgagcagtaccccggattggtgtgcaccccgtcatgcggacgcatacgaagccaagctaatgctggtcaagtacttccacctggactctatcaagagtatcacacaggaacatgcggagatgtggattagtaagaaacctcacaaacgggcggagttcttccacaaacttcaagatatattctggaaggatattaagaagtgttctaacgtgacgattagcccctttattgaagccctgaagaaacacaagaaggacttctttattaggacgggacagtctgccaaccctaaatacgcccgtatgtacctaacccaaatgggtattaataaggaaatggaaacggagcagatcgtagactggtatcgaacttactgctctatcgaggggatctctgtaccgtatgagtttatgacggacgaggagaaggcgctggccgatgaagcgcaaaacgaacttggagcacgtaatgagcaagcgtgatgcccgctgggagacaaggaagtttcccaaacgtgatacgaaagcacggaaagctaaagaaatagaattgtgtagggtaatacccattcgtttagcacaaatgcccaatatctatgattggctagaggctcagcgaaagacacgcctttctatacgcattaacatggaacttaacatggggtacaagagtctatctgaatttatgcacgttactttcgaccctacgttctatgaaaatcgcgattgcttagaagctaaatctgtattataatagtttcataaattcgagagaggataaagaacatggcaatccgcaaaaaacttcatgcgaatagcatccctgacgaaaagtttaaggaagcgattcagtggctagaagatggcaagaccaagaaaggcgcttgcgaaatcctcggagtagcatccaactccacgatggagcgtttgatcgaggaatggaaagataaccagcgtgtttctgctgaaatgcgtaaaaagaaacgtggtactaaaatcgaaggggctgagctggccaacgttatcgattcgtatctgtccggtgatagttttgaggcaatcgccgagcgtttctaccgatctgcaaacatgatccgaatggttctgtctgcacatggtgctctgctccgtgttaatggtgaagttgacccactctttccacctgcgattccagaagaatcaatgaaagaggtatttgaagtaggcgaacacgtttgggttccaggatatcagtgtatcggagaagttaaaaaagctctggacaatccggtaggcgcatatcgtgtttacctgctatccgaagcccgtcagcagtacgttaactatatgtattgggatctggcgtctgttgagcatctggtagcacttggtgttgatatcaagtctctgggcttcaagtggggcaaagaagacgtagctgaactggttaataatgctgtaaaagcagccctgaaattagagaagagaggcaaaggtgagtaaatatcaactcctgaacctatttcagatttattccgaaggtgctacagctatccgggatctgcactacgcagttcccatggacgaagcagaagataatggctggcttaccaaatacgatcgtggtttgctgaagatgtatcgtttgtcccctagtggtttggtagctgttaaccaaatcctagaaaattctgtttgctttgcagctcagtaacttgttataatattctcatagtttgaaacaaaacttaaaaactcttttaacaataaataaggaagtaataaatatgtctactccaactcaatggtctcctgaactcgaagctgaactgacttccgcctacgtcgccaaaattgaactcttcccggaagatgagcgtcctggcgtttccatggagatcgtagctgagatcgctaaagagcacggtgtttccccgaatggccttcgtatgaagctgtccaaagctggcgtatacgtcaagaaagaagctggtaagtctaccgctaaaactggtggtgatgcccctaaagctggtggccgtacttctaagtctgatgctcaggctgaactgcgcgctgcatttaacgacgctggactggaagatggcttcctggacgaatcgatcgttgacaaactgaccggtaaagctgcctctcacctggccgaagctatccgtaaaatcactaaataagagggtattgcaatgaataaagcacaagtcgtagctatctgtgaaaaacacggtgagttttgcatgcaatacaccaaactgcgtaccaagggggtgacttacctctacggtacgactgagttcgatcctaagcaagataaatatctggctgagcgaatcgtccgtgaaggcctggaacccgctgacaaagatcatatcctggtctttagccgctctagcgataaattccgctatattccgattgcgaatattaagcgcatcaccagcctcaaccaagaacttgatcgagctactccagtaggtcgttaagacgcaatcagccccttcgggggctttttgtttatctgagaacaataaaaatgaatcaaaacatttgtcaggattacgaaggacatattgatgatcagtcccacgttatctttgaagatgaagggcgacagattcgtatgactgtctcggagtttagaggcaatttatactttggtttccgattatggttactggatattgaagataactggttccctactaaatcaggcttctcgttcccttacacgttagaaatgactagcacgctgttccgagcgtttactaaaatactaagcaattcagaggttcttcatgaagtttaccgtgaatctcaaaagacccaagccagtgacgactaagttgctggctttttctttaaaatctcaattgcttagtgttttaaaccttgatataatattctcatagtttgaaggagatctttatgaaagatcatgaaattgctcagttggtcaataagctaaccgaagctgctaagacgtatgctcatactcagcaattaagagcacacatgtctagaattgttaacgaggcactaaagaatgcgaaagataacacttgatgcgtacttcagtcccccactccagggccaggaactagtcctcacgtggcatgaaaaagaaaacggtaagccagtagttcatgtattgtccggcttccagatgctaggcatgtggtacgagaagaacgtattggtatgtgaactgtatagtccaaaatctaatcgtagggtaatgtccaccttccaggcggtatgcgaaaacttttactgggaagggaagactcagatgctgttcgattactacgaggccaaataatgcaacacgttaaagaatttattaagctgtgccaagacgcatactacaaaggcatgtcgatcatctccgatgaagagtatgatgccttaatccgtcgttttccgctagaggaagaaattggccctaaaggtgatgtacctcacctgttccgtatgttctccctacagaaagtgtaccctggccgcggcgaagaagtacccttccagggcattgaaacgccgaagctcgatggctgtgctatttcacttctgtatattgatggaaagttcgtttctgcgctaacccgtggtaacggcgtcttaggtaatgatgtaactcataatgtgaagttactgaacatccctaaacagatctcccaaaagactccggtgcagattactggtgaagtacacatcaccaaagaagttgaaaatatgcgtaacttcgcctctggtgctattaacctgaaagattctggagagtttctctcccgtattgcggaaggtggcctgatgtttacggcatatagtattcagtgtgaaaccggcaaagttggcctgaccgctactttctgtggagatatgcatatccttcagggtgatggttttgttacctgtctgaatatctccagccaggtagattggttcccaacggacggcgtggtggttcgtatggacggcaacaatcagtttaacgcagcaggttggactaacaagttccctcgtggcgcgtacgcgatcaaagaagacgatgaaggcgaggttactacgctagaacgggtagaatggcaagttggggcttccggtaaggttactcctgttggatacttcaccccggtagtcatcgacgatgctgttatctcaaaagctactctgaataacgttggctatatcaccgcccttgacctagaaatcggttgccagattcgtgtaattcgtagtggtggggttatccctcgcatcgtagaacgcgtttacgagtaacacttgattcaatagatacaccgtgatgattttttaaagtagttattgacattttcatcgccagggtgtatactattatcattcagttgagggaaagaaatatttggtgagagactgagctaaattctgaaaaatttcgattgcttagtcctgattttcttgctataatatttatataaattgatgaggaagaaaatcaatgaaaattgaaattccactgaattgcccctcttgtggttcgaaactggacttagttaacgatcagttgttctgccgtaacaagtctatgtgtccagctcaaagcagtaaattaatcgagaacttctgttcaaaaatgaagttaaagggttttggcccacagactattgctaaactggaaatcacgaaagtttcagaactctttttcctgactaaagaagatttggtcagagctgtaggtgataaagtcgccacgaaacttgagctagagttggaaactaagctgagacaagatgttgactttggttcggttcttggatctcttagtatccctcttatcggtgaagttgctgctaagaaattatcccagctttacaacgatttccaatctgtgaaagcggaaggtaaagctggagaaaacttagcttcgtggaagaatacaccggcaggacaggacgtaattaatctaccatggaaattcagtggggcgcgggaaactcaagttaccccggcgactgaatccaacggagttgttctttgtattactggtaagctcaacgacttcaaaaatcgtgcggacgctaccaaatatctggaaagtcttgggtatacggtgaaaacctccgttaccaaggctgtaaactacttaatctgcgaagatgaaaccaagattggttcttcttcatacaaaaaagcacaatcgctgggcatcgaagtcttgacgattaaaattctactggagaataaataaaaatggctaaattaacctggaacgaagaaatcactgcatccctgaccgctaaagctaacgctctgaacgcgaccgttatctctcaggaagctgttgctaacatcgctgctgaactggctgctgaaactggtaaagaagttaccgcgcgttcggtcggttctaaactgcgtaaagaaggcttcgaagtgcagaaagcatccgacgtaaccaaatctccgtggactccgggtcaggaagatgaactggttgcattcctgaacgatcatccgggtcagtatacctacgctgaaatcgctgctgctgtagttggtggtgcttataccgctaaacaagtacagggtaaaatcctaagcctggaactgactgccgctgttaagccgactgaaaaggccgctgctgtacgtagctttagcccggatcaggaagccgctttcattaacgccgttgccagtggcgcgtccgttgaagcaatcgctgctcagttcgaacgtaccgttaagcagatccgtggtaaagctctgagcctgctgcgtgaaggccgtatcgaagctatgccggttcaggaagtctctaatgctaaggcacgtgaagacgttctggaaggtctgaatatcgccgatatgaccgttgctgagatcgcagaagcaactggtaaatccgagcgtggtgttaagtctatgctgagccgccgtggtatctccgctaaggatcacgatggtgttgctaagcgcgctaaacttgacgctaaatccgccaagtaattgatttgacctgaggggagaggaattttgttcctctcccctttttcgtttaagtagacgctaacgcggcgtagagagtatcttatgtataacgtccaagcagtagttttgaaaatgctcctagcctccgatcaaaagcaggtggctctagagacattctctagactgcgcaaagatcacttcaatgacgcatttaccgcgatctaccaagctgtccagaattattacaaaaagcataacggaatgccttcgttagatgctctaatgctagagtctaacagaaacgcaaggttgtctcaagcactaactgttttagcaaacactcagattccagacgttgacatatcgcatgcgattcatgtcctagagtcggaatacacacaggatctattcctgaatctgctagaaactgatgtgttgcaggatattaccatactggatcagggagaattacttgatcgagtagcggctctgcacatgaagctagaggaacgagtaacaacgactggtaaggtcttcaacgccgatactatgcgtgttttcaagagaaaagaagactccatgttaaatcttatctctctcggcatctcaaacgaatttgatgctcaacttggcggaattgccagaaaagaaacactgctactcggtggatggcgtggtacaggtaaatcaatcatctgttctaacattcaagtagcccagtattataacggggatatcgccccatatttctccatcgaaatgccagagaacgaagtctttagacgtaacctagccattatggcaggtgtttcagctaaggctatgcgtaatgactccttacaaggtattgaactcaacaaacttgcgaagactcgtgcaaaaatgttcgaaggcggtctggaagtatataacgattttgtatcacgttatacactcaacgagatgagtgacttccacgatatggagactatgctaatgcaggaaagacccctgcacactcctatgatcatcgtatatgatccggagcttagtacagcaaccattgatgttgaactgactaagttaacctccaagtatggggacaaggtaacaatcgccctgctagactatatcaaccaggtacgtttgcccgatacgaagacattagatatgtatgactggaagcagcagatggttgtctcctctacattcaagtctacgtgccaaaagcataacgttgctggtgtagctccttaccagattgaccaacagggtaacgcccgtatggcaagaggtattctcgattcctgtgatatggctgcaaacctaaatgctgctaaacagaacgaggggcatgacggtgcaatcaagtttgacttcgtaaaaactcgtaactccgagggtatgacattcatgccgaagatcaactggaactcattgcgtatggatcagacttctgatcttaaactagaggatattcgtcagatggaagcagagtttgttatcccacttgaaagcgataaaccgaaagacaaaccaaaaaggaaaaaggcttcggatgaggatactaatcccaccggagaatcctcaagagacttatgagtagaataaccgagcttttagatctcaaaaggattgaatacagagatacgggtggggatatcctcatccgctgtctcaatcctgatcatgaggatgctcatccaagtttgcgtgttgaccccgactctggggtttttcactgcctaagctgcggatttggtcgtggtataccaagcatctttcattacttcaatgaagaacagtacaggacgtcccctagactcctgaaagttcgtagaatgattagtgacctccgaaccgagggtcgcagtctagaaattccagaatcagccatgatattcgaccaagactttcgtggtatcaaagcagagactttcaaaaagtactttgcattccaacaaacagaggactgggaaggtcgtgtagtgtttcctattacggatgccgtagggagaaacttattcttcttaggccgtaatatggatagctctgcccctccgaaatatatgattagacctaagaaggtctccccaccaatcttccctgttcgatataacaccccagctttaatcctagtcgaaggtatattcgacatgttgaatctagaagacaaaggttgccctaacgtttcctgttgttttggcactcaccagttctcactagataacattgcagataaattcatgccgttccaaatcgcgggtacgactcacgtagtcatcgtattggacaatgataagtccggtaacgaggcagctaagaaactggccaaattaatccgtgataagaccagaattataccaattataggtaatttcttgcttccagagggcaaagaccctggggacctagatgctgaagaagtcgaccagctcatcagaaacgtagaaatcttgattgccgaacatgtcaagatttgatataataattgggtaagtttgagaagaaacactgacgttttacttgcttacctaataggagaaatcaatgaaaattgcagttgtagacaaatcaccgaataacgtccgctatcagaaacacttcgaactcttcgaccatgaagttgagaccttcttcatggctagtgagaaagtaaccgggcgactgctcaagaaacatatcactatcggaacaccggagaacccgttcaatccggaagattttgattacgttattctggtaggtgcagacccgttcttgaagtttgcagctaagaaaggcatttccgattattcaggcaaacgtgttgagcatgatgggtacgctaactggattgcaagtatcagtccggcccagctccactttaaaccggaaatgaagcccgtatttgaggctaccgtagagagcatccacgccattctcaatggtcgtgagaaacgctctaaagcgggtgattatcgcccgattcagtgcccggatgaggccgaagcatacgtgaagatggtgtataccatgtgtcccggtatgatcgcatacgactccgaaaccagtgcgctgtattgccgagatggctacatgctagggatttcaatctcccaccaagagtatcagggcgtgtatattgatgcagacgtcataacagaaaataccgtctattacttacagaagctgttcgatagcccggaacatggtgttgtgttccataacttgaagtttgatatgcacttctactgctatcacttaggtttatcctttgacaaggcagcggaagagaaacgccttcatgataccatgctgatgcactacgccttagatgaacgacgtggcacacacggtttgaaatctttggcgatgaagtatactgacatgggggactacgattttgaactcgaccagttcaaggaaacgtattgcaagacgcataagatcaagaaagaggatttctcgtatgatctcattccgtttgatatcatgtggccttacgcagcgaaggataccgatgcaacactacgtctgtctaacttcttcctgccaaaagtcgaagctaactctcgactgaaatctctgtattatgatgtgctgatgccgggatgcgtattcctacagcgcatggaagatcggggtgtacctatctccaaagatcgtttgaaagaagctcaggttcagttaatgactgcgctacagcttgcaaaggctaagctgtatgagtatcccgaggttcgtaagctagaggaagaccaaggctcggtatttaacgcagcctctgtagtccagcttcgtaagctcctattcgactatgttgggctaaccccaactggtatcatgacagatactggtgcagattccacaggtgcggatgcgttgaaagaactttcagaccaacatccgatagctaagactctgctagagattcgtaagatctctaagctgctctcgacgtatatcgagaaaatgctgatcagtattgacgctgacggttgcattcgtactggattccatatccatatgactacatccggtcgtctgagttcgtctggtaagctgaaccttcaacagttacctcgtgatgagtctgttattaaaggttgtattgttgcccctatcggttatcgcattatcgcatgggacttaacaactgctgagatctactatgccgctgtactgtctggtgacattaacatgcagcaagtgtttatcaacatgcagaacgacccggaaaactactcggacttccacggttcaattgcacacatggtatttgctctgccatgcaaacctactgaagttaaaaaactgtatcctgcactgcgacaggctgcaaaagcgatttcgttcggtattctttatggttctggcccggctaaagtagcagcgtcagtaaacgaagctctcctagaagagcacatgaagactggtaaaccgtacaccgaatgtaccactggtgatgcgaaagagtacatcgaaacctactttggccgattccctcagcttaagaaatggatcgataaatctcatgcccagatccagactaacggcttcatctacagccacttcggccgtaagcgtcgtctgcacaacattaactccgaagaccgtggtgtacagggtgaagaactgcgttctggtttcaacgccatcattcagtctgcatcttctgatagtctcctgctaggtgctatcgataccgataatgagattcgctctctgggtctgcaggacgaaatgaagattatcatgctggttcacgactccgtggttgccattgttcgtgaggatttagttgatcagtacaacgagatgctaatccgtaacattcaggtagaccgtggtattagtattccgggctgtcctattggtatcgactctgactccgaggctggcggttctcgtgattactcctgtggtaagatcaagaaacagcgtccttctgttgcttgcattgaggacaaggagttcgaggagaaagtacgtagtattatcggtatggaggacttcgactacgctgctattgcggctaacgatgaaaaccaccctgatcacgataagtacgccaatattaagttcttgccggaaatcagcaaagatattgtcaacgttcgcagggttcttggtgcttaactttagcttaccagtatatgctttaagggcttatgatgtactcttccaagagggggagtacattgttatccagacgagatttacaaggtatgtgctggacaatccaagccttcctgggacattctctcagcgaaggctttttctttatggtgagcgggaaaatttaccttacaagctctacccattaaagaaacagttcaagtacttatctcagataataaattctggactaaagcatttcatcgactccacaggtaagatagtaacatggaaacctacaacttattataacattatcacagaacgcgttagaggatcaactagaatcttcaacggaaagtaccagtgttatgtcaagaacgttccatatcctttcttacttagtgaacctgccaactatatttcgtacgcgttggttcgcggttcaccagttatttttgatacgcacgaagaggagccagaaactcctagacttagagttaagatatgaagatagttatatctaataaaatctattgtaaacccagcaacgaactgtgggaatacttattaaaacacacttcataccagatctttaaacctggggcgaagtatcctctaatgttccagaactcaggatcggtaggtaaagaaatcaagtggttccccgtaaccagattagatcttctagaatctttcgggcaaaaagtgacagaggtcgttgataaacgtactctagttcctgtggatattccaaagccatcgtttaccctgagaccaggggatcagctccctatatatgaagactgtaacgatacgtgcattattaatggtaaacctgggttcggtaaaacaatccttgctcttgctatcgcacataaacttgggcaaaaaacgttagttatatgtaccaacaccaccattcgagctatgtgggaaaaggaggtacgcaagttcttcgggattgagccaggagtcattgggtctggcaaatttaatatcgattctcctatcgttattagtaatatacagacagttaacaaacacggagccgctttggcaaaagaattcggcaccgttattgttgacgaagtgcaccactgtgttgccaccacgttcaccaagtttctagagcagtcctcggcacgatataaaatcgggctatccggtacgttaaaacgtaaagatgggttacagattatgtttaaggactattttggaacgaaagtgtacagtcctccggtaaataacactctgccgcctactatccataggtttgcgctgaaaacgcaggtttctggaaatatgaatgtgccgtgggcgataagagctaacgatgtatattcgcagccagaatactttcaacaggttgttgacttgtgcgagttatattcgatggcaggtcataaagtcctgtttgtgtccgatcgtatagatctgatcgagagagttacgaatgctttggaactcaggggtgtgaagacctacacgatcaccggagtaacttcgctcgatgatagggagcaggtacagattgacgtgaccaatgacggtccgtgtgtattagcggcttcccaaagcatcttctcggagggtgtatcattaaatgctttatcgtgtttagtgttaggctctttaataaataacgaatctctaatagaacagttagcaggtcgtgtccaacgtatggcagatgataagttggacccaatcctcgtggatctgaagctagggggtgtaggattcaagcaggcagcgggtagagaagcggtatatcgtctcaatgggtgggaagttcttgactttaacgagaagaatatggtaaacttagataaaattctgtttgctaagaaccccaaagtttgatataatatttatattgaattgagagacagatttacaaagaagagttaagcaaatagttaaaaatttcagttgctgagttctcaaaaatacgatataatatctgtataaattaatgggaacagcaactgaatcttcggaaagtccgaagcagaaaaataaaaaacttagttgctaaattctctcaaaatggtgtataataatcatgttgttttatgattacgaaaaaatttacatatcagcacgaggtaactcatcgctgattgtacagattatcagacgaatggttgaagatcccgaagctcatgtgatgttaacgggtagatcattcatcttgaacgaagatacaatcgtttataacaaacgaaagctgtcagaccgacagttggctgagtatctaggacttttgagttttagaaactatgccgaatatagcttctcgaaggattcttcactggatatgcaatatattccaccgtgggttcctagagcagttatcgagcaccacccactaatcgcaatcaacaagtcaaaattgacatttatcgaggaaaaataaatatggctactaaatcttggggttctactactggcggttctaacggcgacaaactggactacatgaagttcaacaacggtaagaacgttgtacgtatcgtttccggcgttctcccgcgttatgtgtactggattcagaacaaagaaggtaaaccggctccgtttgagtgcctgcgtttcgaccgtgagaaagagcgtttcatccgtggagcatccgatccggttcacgacatgggcttcaaggatccggagaagaaagatggtaaggctcagccgctgcgtcctaagaaaaactacctggccgttgttatcgaccgtactgataacaaactgaagctgatggaagttaaggcaaccatcctgactggtatccactccatcatggcccagctgaatctggaagatccgggtgaaatcgatatcactatctccaaatccggtactggcttcgatactaagtacgacgtacagcagatcgcagcgatgcagttccagatggctaaaaatcagccggattctaaagaggccgccctgcacgaagccgacgttgctctgattggcgaggctctgtacaacgaagcagacgaattcgaaggcttcgaaaaagtgcctaaactggatgttacctacccggttccgtcctatgatgagcagaagaaagcaatccaggcatggctggaaggtaagaaagatgaggagggcgatgaatctaaaggtaatgaaggttccgcgaactccggtaacatcgatcacgaagcagcttctgacctcgattaatccaaacaaggggagcttcggctcccttttattttgactatgaaaatacttttctcagcagatcatcacatcaagctaggagcgaagaacgttcctcaggaatggcagaaaaatcggtttattcttctcggcgaaaagctggacgaagtgtttggagctaccgggtgcgacctccatattattgggggtgacatcatggatgtttcagacccgtcttcagaagaagttgaactactgtttgcattcctagctaccctccaacatcctggtattatttacaccgggaaccacgaaatgaaatctaaaacgatttcttgcctggatcactatgcagcagcaattagcgacgcaacagacggactttggaaagtcgttaaagactaccgatctccagagttcgatatcatcccttacagcagccttcacaaagctagttggaagcccagagtttcagacatttgcttcacgcatgtcagaggtgcaatcccgcctcatgtcgtaccagaaatctacctcgaaaggttcgtcgaacatgggtactccaaagtatttgcaggcgatctccacagctacaagaacagccaaaagatcggggacgttgacctgctctatcccggatctccgcttacaacttcgtttcacagagaaaggacaaaaggaactaacggagtttttatcatcgatacggtcttgccaagagaccatgagcactacctttcgtgggttgaactgggagatcttccacagctcatacgaaaaactattgaagtcggcgagccaatggaagccgatgcgtatgacagagttatatacgaagtcaccggcgacgtatcccaactcaaaacgttaaagaacagcgaactgttagataaaaagatcaataaccgcgtcaccaaagatgctaagttagatcttgacgatatgtcactgctacaggagctggatacttattttacaaacgtgcagaaactagacgaagcgtctagaacccgcatattaaagagagccgctgagtatgtcgatagtaattaataaattgacaatcagccattttatgtcgtatgctgagaacgtggtgatcgagtttgataatcaccgcgtaacccagttaatcggacgtaatgggctgggtaaatcaacaattggtacagctctagaggaacttctttataataagaactcacgcggtatcaagaaggacgacctgtttaactggcatactggctctaaggcctatacgctagaaggtcagttcactaaagatggtgacgtatataacgtcaagaaagttgtgaagtcaaccgccaaagtaaccctcactaaaaatggtgaagatatcagtggccatactgcaacccaaacgtataagctgatagaagaggtactcgcctgtgattttacgacatttactaagctcgtatatcagtcagttggatccagtctcgacttcctcaagacaacggatgctcagcgcaaggctttcctcgttaacctgttcgatcaggaacaatataaggaagtttctgaacgtgttaaagcgggacgtaaagccgtctcggcaaaactgtccggattggaaggtagcctgcgaactgcccaatctatactttcctcaaaagcctcgcttggcacacctcaatcagagatcccaatccctgttttcgatgaagagccactagtcgaagaattaaccgaagcaaaagtcaaggtagcactggctcagaaacaaaaagccagtattgcaaaacgtagctctttggacatggccgtacaagctgccgaaaaaacttttgcaccattcgaaaatttacctgcgcccacctcgaaatctgaggaactcctgagtgttacgcgtaacctaacggtcgtggcaactagagcggatgatctaaagaaacgttactacgatttcaaaaatgcagcaggtaaaactcagtgttttgcgtgcggaactcacttagacacctccgccgctcaagaggctatgagacgaactaaggaggagtatgatccgctctataaagaacgtcaaaagctggaagcagaagttgaagaacttaggaaggaagatagggcgtttaaggattacatctctaagtttaacgctctggaacaggctcgcaaaaacctcaaggaatttgatgaggtcaatggaacgcaggatgaaatcgtagatgcgagtggattagctgagcgcatcaaagctattgagtctagcattcgtcaaggcagatcttcggtagaacttgcgagaacccataacgaatcagttgtacgtgaaaacgcgaagtatgaagctaaacgtgagcagattcaaaaggccgagcaggagtttgataagatccaagctgaactgtccttagttgcagaagaagtagcggatctggatatcttaatcaccgggctgaaagatctggtgggatataagctagagcacagcgtcaaggtatttgaggagatgatcaaccactatctttctatcatgaccagcggtaaatttgctctagggttcgagttggacgagacgaagctacaggttgtcatctacaatgatggtaacaggacttctatggttaactgctcaaccggtcagcagagccgcatcaatatctccacgctattagcaattcgaatgttgctttcaacgattagtaaggttaatatcaatctgctcttcctcgatgaagttgtaagttatattgacccggatggaattaataccctcgtagaacttctacaggaagaagatcagctgaattcaatcatcgtatctcacgggcatacgcatccgtacgcacataagattgaggttaaacaagatgaagctggcttatcaattttggaggcctaatggccgtagatagtcgcgagaaaggaaaacgagcggaataccaaatccgtgatatgctgcgtaagtatacctccttggactgggaacgtgttcctggttcaggggcttttggacagtcccactccctgaagggtgatgtgtatttacctccaagtgtgggtaaaatgagccaatactgttttgagatcaaacactacgcagacgagaaatttaatagcaatatcctaaacgttggagaatcccaattagaaaaatggtgggcccaagccgcacgtgaaggtgagcaaatgaacatgaaaccagccttgatctttaagaaagatcgtgggcaatggcttatcgctctggatagtagcgaccctatgattgataacctcatgagtagagcacatttcatagttaataaacgtggaatggaaattgttatcggtctttttgagccgtggttaaacgcatgtgatattggagatttagttaaatgagtaaatcctggggaacaatgaaacgagaggcagaacaacgccttgcctcacgccgtaatcttatgattgttgacggtacgaacttgggcttccgcttcaagaaagatagtggtaagcctattgcagcatcctttgcaaacaccatcaactctttggcaaactcctacgatgctaagcacactatcgttctaggagataaagggaagagtatcttccgcactaatattttcccggagtataagggcaaccgagacgcgaagtacgccgatcgctccgaagcagaagtagaggcggatcgtcaattcttcgaatacttagacgatgcgtttgatcttattgcaagccaattccctactttccgaatccgcggagtagaagcagatgacatggcggctttcattattcagctgataggtcatcactacgatcatatctggctcatctccacagacggtgactgggataccctgctggctccgaatatctcacgcttctcgttcactactcgtaaagaatatcacgagaaagatatgttcgacaaccataacgtagatactgtagatcagtttatctcattaaaagccattatgggcgatatgggggataacattcgtggtgttgaaggtatcggcgaaaaacgtggctacaacctaatccgggaacatggtagcgtgctagacattattgatgcactaccgctcccagggactcaaaaattcgtccaggctctgaataaatcaggcgaactcatggagcgtaatctaactctagtagatctcccaagtttctgtggggaagcagttgccgcagcaggacaagatatctacgatcaattcgttaaagacattatggctattgccacaggagaagtataatgcgcattaaattatctcaccccgattgtaaacctcacgttggaagttcggaagcggccggtatggatctacgggcctacttcggagatcgtgcttccgacctgttgcgtgccatacctccaggggaatcattgatgattgataccggagttgcggttgagattcccgaaggctgggtaggaatcgtggttccgagaagttctctagggaaacgtcggctaatgattgccaatacaacaggggtgattgactcggattatcgaggaaccattaagatgaatctgttgaatatgagcaatgagactcaaccaattgataacttcgagcgtctgtgtcagttggtgatcataccccattataaccccaacgatattgaaattgtcgacagcctgacagacactgatcgtggagaaggtggcttcggaagttctggtaagatgtaaatagaaaaaccccagcggattgctccgactggggttttattttatcccttcaactgagattcaagatatgcaacacgttctgtaagttctttgacagagttaatcaataaggctacaaccccatcataactaacgccgagcattccatcttctccttccctgacagcctctggaagtactttctgaatatcctgggcaatcaagccagcttctagggaagctccacctaaaggcagttccttatcgtacgtataccctgtcagctgcgctactttctcaagaggattctctatttcctttaagttagtcttcaatctagcatctgaggacttgataaagtctgtcgcagtccaggatccagtaagagtagccgctccagtagaatcgacagtcataacatctactacagcacccgctatagtcagcgaggtatccgtactcatcttagccacggtgaatttcttaccgtgggcgtagaccatcttaccgttagatcccctcttcttcatcatacccaggtctttatccttaccaaggtagatcatagcatcgtcagaaaacgtggtgatatctcctgactccactaattgtcgagtccattcagaccataccatagttccgccgctattgtagtgccatctttcataggatgctttggtatctccggctatcagcacctgacggtgtatagtgtctgtatccgtattcctacggactctatccactctaactctgaagttaccttttaccccattaggtttgttgagtactgcagcgccacctgcctcggatgggcaatcaaaccctttctcgctcccgtcttctcctgaggagaatatcaggttattgaggtcataggtgctaggaataataggataccacaaggaacctacgttggcgtacgcggcgtctgtaacagatatctttttggtactaaatatgccgtcgcttctaaactcaaaatcccctgcggagacccctgccttgtttttagctcttacttttaaagtacccaaattgtccgttgaaggcggagcatatataaccgccctttccttattgtttcctttgaaccatatatgagcgttactggcatccgtggagtcgtttgcatggaaagctgcaccaggcctaccgcaccatatatctcctgcggtttcaatttcacccactacctctagcttaccttcagaggatatactcatgagccgagtccaagtagaacccgtgccgttataccagtcaaagccccctgggccacctcctcggtggttaaagaagttagtgaatccagtcccagaccgccagttccagttcatgtatgccccctgtgagggcggagtccaatctaccattccctgagcagctacttgatagcccttagttatccccctaactgagagcataggggaatctatagtttgttctccagtggttctactagccacaccaaaaccgttctgggagtcatagatagagtatacgttaccacggataaaaccaggtgcctcggtagtaatctctggagtagggtacagaaccacactacccgtatactgtagacaggctatagcggggtttgctatatagttggtcatctgtacgtagaagtcgtactttgtttctgatatctggacgataccataacgcatcccttccgtaggatacataccgcttagcctacgtaccttcaagactaggtcaatgttgccactattaatagctgatggcatcccacgaccagatatgctaacaaagtccgtcccaccatgcgtagaaccaaattggtctacgccagagatcataaactctgccttagctgaggaggcaccagggttggtaacagtggccagcttcagccaggagcttgcgttaccagtgctaacccctgcccttactaggttagctaaggccgctacgttctgggtatcatagaatacttgtttacctttaaacaagagctctctgccgtccgttatggttaactggttatcgttacctccagcagtattacgcatgtagatatctgcaccacctgccccaaagtacgctttgttacgtactatagtagcaggaccttctagatagagattgccagggatacgggtgtgtccagtggtatctagaagtttcagaatcctacgaatactattggccggtccacgctgaactattcgtacttcctcgtccccatcatcaattacaccaatctctaggaatcccttgttggtgccatcggatccggaacctatataccatccgtcattgtcccctgtcacgccttccagatgtttggtcgttgctcctgagttatctttattaacaaactttaaagacccttggggattatccccgttagggcctaagatattcttgatcgtggtttcggcatctttggctgctaaagcagagccttcagctctggaggcagcatctaataactccgtagcagccatggagctaactgagtagcctagctgtacagtaaatttggggtacttacttacccttgagttagctccgtcaagggcggtaacctgttgtgcaataattcttgttgtaatagccattacgcggttactccatcactgacgtacacgctcccttccataactctgtaagaagtagcggtagctcctgttcctttagtcatgattacatcgtagtaaccagcgaaccgaagtctaggattatatttatctcgttctttacttgccttgctgacgattgttgccacggtagccgctgtcaatcctagcgacgcctgaccttgtgtagcattcactactgttacgacgaaatctgctaattttatcccagtggattccagagagtctttaattgaagacttaagggttacccctgtcaaattgacaggggtttccgttgctgggtaagcagagtcatcgatatccatgaactgtagcatcagtccgtatgatacgttttgatcaaggataatatcaactactctgttttccgtgctcatttattaccttatatgaatgtacccgttagccaggtctattttcattgtgtacgtaccttctgggttagaactcagtgcagcagccctattgtatatggtattaacaccaatctgtgccagaaacgcattgtttgcaataatcttatccgcagtgatagagccggaaacgatcatatcaccgtgaacagttagtgctggagctgtccatgctgagccattccattggcgagtccaggagttctgcggggaacctgacttatactgggtcagtacatcatacttaactggcggtccagcgaaggttgactggaagaacgatgctgcttgagtgtcattccacgcagtcaggtttgatatcggctgggtgtagaaccccggcccacgatcccctacggcgtcatactggttacggacatatgacgttacgaaggctcccttttcaatcttacaccttcctacaacgttatttccctcagattggttaactgagaatctaacggatatcctatctgaattagccggcgtagtgaaggtaaagctgctcaaacctgcagtagtagacgcaatagtcttcagcactcctccagtggtattgcttcccttagcgtaccagaatacgtgacaacgaacttctacagcgttatcagtctcgaaagacatcgtatatgtggtgtttggaggaaggtaggtgaacatggaggcgggtccatctgatgggagggtatacgcatcggtaactcctgtacctgcgattatcctagcccttagtaactcgtagttcttacctatagatgagccactacccgcaactccagtaattgagtctaaccaggccttaaagtagaataggttctcgttaatactatccccgtctcgaataggatctgaccaattacccataatagcattagtttccccgttaaactcagccttaaccatccatagagggctacctggaggagggctatctgaccagccagccggattactaccagaaggcctactaggagtgctcgccattacggcgaacttcatactcacatagttgcctttagaacctggagtaccattagccccgttctcacctactgctctgatcgcaggaccccaggatccattcacctgctgacgcatgtacagatcacctgaagtgaacgtactgtgccagttagtagacccatccttagaccattgaacgtttacagagttacctgctggcccttgcggaccagtagcaccagtatcccctttgttaccttgaggacctgtatcacccttgttaccttgaggacctgtggcaccagtattaccttgtggaccttgtggaccagtagcaccatcctcaccatccatagacagatcttcaatcgctatagccgcaatgtatgcaatgccgaaaggcgttgcgctaccacccatctggataaacggtctagcctcgacagtcggcttaccatcagaacggtcccctacggtaattaccctgctttccaaacgccatccagtagcgtctttagctggggctgcggtggctgctggccatccagtattatccttatctgcgcttcgacagtgtagaccgaggttaagagcatactccccttctgagttattaacccaggcggttatacggtatttcatccctttcttagtagggaaccagttgttgccttcgtaggtatcacgtgagttcacagaaaacgctttcttgtgccctcccggatctcctccggtaacatcaactataggtttgccccaactatttgacgatccgttgtcaaaagagcctgtcataaccctgtcgtatccaatccccgggatactcttcttaagggtatagcgcttgactaaggtaccgtacttaggatgactagcctggtagttaacccaaccagatactacgtctataccgtcaggcataccgctaggagtgtagtaaccagaagagttgatgtttccgttcaagttctctttctggtcaacacccccgacaacctctactccgaaggtacactggctagtaacatcaactgttccgtaaaacactttgaagtagccattagtgccattccaattctgaataaacccgtaagggttacacagaatagaagcagattcgttagtcaaataccctactagagagttcacaccatcctgtagtctaacgattgtgatagtatcagtcattccatcacaggttgcggctactgtaacgtagtccgagctgccaaactgggcggaggtaatagtcttattagtggctgtgccacctaaagatatgttagctcctgcctggttcttggctgtccaggttatcgcagcactagtattctgtctccaactatcaatcttaatagtaccgttagacttcaggttaccattagtatcaaagctaaaggacagactatcggacgttaatgcgaaggctttggcattagtaccacttggaccttgtggaccttgtggaccagtagcacccgtggctcctgtatcacccttattaccctgtggaccctgtggaccttgagaaccatcagcaccaatagtgtccaattcattcctgatgaacgctgtagcgaaatccccctcttccagcttgatattggagataacgttggtactaccagggacattcagagaaacacgaacagaaattctatcgcatccctcaggaatagtaaatgaccagctagttctacctgcagagtttgatgctacccatgagaacacattagatccactagcccctaccgggataaagaacacgtgcattctcatttccagggcgctatccgtgtcaaatgacatagtgtaacgcttaccagcagtgactttagtaaaggccgttccacctccactgtacgggccagtataagaatcccctacaccagctcctgaattgatacgtaaacgcagttcatcaggattcttagtaatggtggatccacttccgctcgcacctgtcagtgagttgatccatgccttacttgcgaataggttgagattaaccgtctcaccatccaaacgaacagggtctgaccaggttccttggagctggttgctggagttgaattcacccttaaccatccatagtggagagccatcaggaggagcatcagaccagttagccggagagttaccagtaggcttagctggcttggtcgcagctacttggaacttcagggaagtatacttaccatcaggaccaacctgaccatcctcaccaactgcacggatcgcagaagaccacacaccgttaacttgctgacgcatataaatgtcgccagtagcgtaatttgtgtgccagtcgttagcattaccagtcttagaccactgaacaccaactgaagctcctgcaggaccctgcggaccctgtggaccagtatcccctttgctaccctgtggtccagtagccccagtgtctcccttacctccttgtggtccctgagggccagtggcaccggtagccccatcggcaccgtccatagttaggtcttcaaagtggatatccccaattagaactgaacctaaaggtgcccctgtagttttattatccagttggaaccatggccaggcgataccctcatcggcggtgcctagtgttaactcctgatcgaagtacacccaagaactgttagaagagggacctgtaaggatagttctagacggataacgtctattaccatcattacgttggacaatgaatcctgctctgaaatgagcttcctgcaacccttcagcattataccagaatctgatacgtactttctgccctgcaactaccggtatggtattcttaccttccaaggtatccctagaagtgattcgcagtgccttggtaatgctttggttggttggacccgtaacatcctgcacagctccaccccacgaacccttcttaccgttctcgaaggtgttagtgatgatcatttcgtagcttttagctaagaacactttagttactgcaaagcgcttagtaattgctccgtatttagggtgagtagctttaatatcaacccagccttccgtaatatccgttccgttagccatatcagtaacagagtagtttccattacttgagttgatgctcggtgttgcattgcttcttccgccctcagagaaagtgcactgaccggtaacgtcggtgcttccgtaccaaactctcatctgacctttggcgttttctaggctctgccagtaaccagagtagttagaaagtaccgtagctgcctcattcgttagaacagcagtcaatacgttctcaccatcctgcaaacgaaccactgtgatctgatcggatagaccgtcacaagtagcggttacagtaacccatttagaagcaccgaagttcgcagcagttagctggcgattatctccagagttcatcaatgttacagcagcacctttatcgtttacagcactccatgtgatacctgcagtggtattctgttttagtcccttgaacagaacagtagcggcagatttaatgtcaccggcggtgtcgtacacgaaggattgatagtcagaagttaaagcgaatcccttagcgttatccccagcgttgcctttagggccctgaggtccttgtggacctgtagcacctgtatcacctttactaccttgtggaccttgagaacctgttgcacctgttgcaccagtgttaccttgcggaccctgaggaccggtagcaccagtagcaccatctttacccatagcatcgctagggtggacaacataggcagtcgcataggctcccaattcaagtttggcacgactcaacacgttggaagagttggcttcattaacagaccaacgtaaggcaacgtgggttgtagctgcaccagtggtgaaagtaaggctctggcgtcccgcggtagaggtcgtcacactgttggttctagagtaactattaccattaccgttatcaaactgcattataaacattctagtggtcacggccgtctcaacatcaaacgacacggtgtacatagtgtttggctgcacttcgataaagtgggtgccattaccctgatacgggatggtatagccatccgtggaacctgtggtagtaatgcggaagcgcatttgctcttcgttcttactcattgaggaaccagtaccgttaacacttgtaatggatcgcatccactccttgaatgcccagaagttctcacctacgccagaggcatcgattcttacagggtcagaccaagtaccgatgatagcgttagtatctccgttaaacgttgctgttgccatccaaagtggagaaccatcaggaggggcgtcaaaccaatccgtaggtttgttaccagtaggtttagcgggcttagtttctgagatacggaagatgatattggtgtagttacctttcttaccgtcaggcccaatctcacctttctcaccgatagcacgaattgcagggccccaaacaccatcaacgttctgacgcatgaataagtcgcctgtttggaagttatcgtgccagttactagcagagctgtccttagaccactgaactagaactgatttacctactatacctatactatctgagtactcgacctgatactcggttttctctccgccctcttccagtttgatcttactccaagtggtctctacgttgagagtaagaattgaaggacgtagggttaagtagttaatacctgccggaactacaaaagtgcgtttaaccttaatcgatgttccggtgttaagttcttctatgaacgtggactgcggggagttcggggcagcctgccagaaaataatatctctggtttggacttcgctcgctgcatcgatattgtaggttagagtgtaacgcttacccggagttaccggatgagagaaggcacttgcaccaacaaaaggagtcgcataacatccaggggatgcgttattagttccagaagtacgggtcagagaatgagtcagcttctcaatgtcgttctttgatgtaccagagtccgtaccagtcagcaatgccatccatttgcgaactgcgaacaagttagggttgatagtaccgtccagacgaattgggttagaccatgtaccttgcagctgaccgctagcgttcatcgtacctttagtcatccatagaggactgccaacaggaggagcatcactccaaccactaggactgttcccagtaggtgtgcttggcttagtgtcctgaacgataaacttcatcgaaatgtagtcaccgtcagtaccatcttcaccaactgcacgaatagcaccgccccaagcaccattaacctgctgacgcataaagatatcaccagtttggaagccggcgtgccagttagatccatctttagaccattgaacgtttacagagctacccgctgggccttgagcaccagttgcaccagtgtcacccttgtcccctttactaccctgtggcccctgtggaccttgagaaccggtgtcccctttactaccctgtggtccttgagcaccagtagcaccgtccaccccatccatctctagagcgaagatatgaatatccgtcacgtataccttacccagatcagacccggaaggcccagacatctgaatccaaggtatagctagtccagtattcgacgacccaacagtaaactctttctctacgtagttccagccactagctccagcagctgccaccgtagtgccctgccagtctactccaccggtacttgcgcgaactatacgcatacccatggctacgtttactttagcctcggacgccattatccacaggcagagcttgtatttctgtccagccactactgggaatgtatttgcatcctctaaagcatcacgactagatagcaccaatgctttgctgaatcctgccgccaggattgatgcacctgttacatcctgtacgacgcctacactccatgaacctttattcccattctcgaatgaagtggtaataacgcgatcataaccttttgcaaggatagacttagtagttgccactctacgaaccacagcaccgtaagtaggatgtacagcacgtaggtcgacccaaccgttgataacgtcagtacccgccggcataccttttaaagtgtatttgccagctgaagtaatatcagcatcaaggttattcttctccatagtactgaaagtgcattcagaagtgatatcgcgcgctccgtagaacactttaaaatcacccgaaccagtactgtagttctggacgtagccggcatagtttgctagaactgtggagccttcattagtcagaagccctactagagcgttggaaccatcatccagacgaacaatagtgatctggtctgtgataccatcacaaacggctgtgactattacagacttagatgttttgaagttggcagcagtaagagaagctcctgagttgctaacgctggtcagggtaatattaccgcccttctcatctctagcactccatgttacgttagccgcagtgttctgacggaaggcctggaacaggatggttgcgtcagacttcagtttaccttctgcgtcataagtgaacgtctgggatagagaagagatgctgaatccttttgcattgtccccttttgcaccttgtgggccttggtttccctgaacaccttgtggaccctgaggaccagtagcacctgttgccccctcttcaccgatagtatcgaactcattacggatgaaggcggtagggaatactccctcttcaagttttatcttaccaatggtattttctttaccagcttcgttcacagagaatcgtaatgagattctatctactccggcagggactgcaaaagtatgggttgtaaggcccggtgtaagcgaagacgtgttagtgaaaacgctcgaagagttggcccctgcttgaattaagaacaggtgggtcctaacctctacagcagtgtctgtctcaaaggagaaagtgtactttttaccagcagtaaccggtatgaagtacgttccgtttccacctgaaggtacggtatacgcatcattggtggaccctgcaacgatttttaacctcaaatcggtagggttcttaacgatagaagccccgttaccattagtacctgtcaaagatgctagccactttttagtagacagtaggttctggttaaccgtatcaccgtcaatacgaaccggttctgaccacgtacctactagggcgttggtttgaccgttgaactcagctttagccatccatagagggttcccctgaggaggtgcgtctgaccaacctgaaggagtctggccagtcggagtagcaggtttctcagctgccacacggaagcgcattccaatgtagttacctttagaccctggagtaccgttagtaccgtcttcaccaactgcacggatcgctgaactccagccacctgtaccaacacgctgacgcatgaagatatcacctgtggtgaagtttgcatgccagttagtagtaccatctttggaccactgtacttctacagagccacctgcaggcccttgtggcccctgtggaccggtagcccctgttgcacccgtagcacctttctcaccgtccactcggatcggatctgaccagccctctactgttagggcgttagtattaccgttgaatctaccagaacacatccaaagaggggttccagttggtggggtacgactccaaccactagggtcattgatattacctggcttcgtgggcttactagcgttgatctgataaatctgaacagtgtaatccccgttggagccatcagtgccgccagtacctgggacaccagaccactgagacgcagcggaatagttggtaccatctactagagcaggcggatttttcttaggatccagagtaccctgtacaacgtacacgttctgatcctgggcagtgcggttaggtgggaatgctgaccatccagctggtggataaacttggtcaagcgggcgacttggcagagatgtaccaagtttataagcaaatacagtctgcttaccctgcataccggtttcaaggtctacatcgcccccaggagtaccgattacaacgttaccagaaatgcgaagagtatcaccgtcccagcgcacatactgagtgttattaccgaggtcaaatttggccttaccgtcaacgttgtcaacacccatccagacaccacctgcgttattaccgtacttcttaccctgagtgaagattgccgggttatctttaccggtcaggttagtaagaattacgttagcagcattaatgtctttagtgataactttaccatcgacgttcacaatcttattaacagggtcgaatgaaatcggtgctttaccattttcatcgagtgtaccaagaactactgcaccagtagcagcgtctactaagaaagtttgctcccactgtttggtgttagagttccagagtttacccttgataccagcgtaggtcatttctacaccggtctcgttaatgaatgcgttgtcgaaagtagtgctttcgtctataatataagtaacttcagcagagttagttatagactgagtatccggaccccaagcaaccgatagtacacggaagcgatggcggatcttataggggaaactggtgatggtaccggccttagccgcacccacgtttagcttgttggccttagtccatccggtttttgcaaactcatcattacttatatattggatgatgaattcacgaacgttagcacccgcaccacgagtccaatcccattccaggcgaacgtcaaaacgctccataccatcttggatgtgggcagttttgaaacgcaggttagttggggcagacggtggagtgaagttgtaggtcaggttaaacagtgacggccaggtatcatacccagaaacatccacagtaacaccatctggcatagtgacaacaccagatacccggatattgtatctgccaactggaacaccaccaaagatgatctgctcagtgattggaccacggtagtacttagtccaggtgctagagccctcaggtttcatttcgatggtaacgtattcggcctcaccagaaagctctacgacaaccataggagcacccacacccacgtcaacagattctgcaaaagaggacactttggtgatcttcggagcagttttcattttaaagttaacagtgctagataggttcatacctactttagcggttattaactcctcatcgaccattgagtcatagaaagcaccctgggcagagtagacagcaccagcggttaaattgttaattgtggcaatgaatgtatcaacgccggtaaaatccctacgggtggtcaccccacccgtagttagccagaaagttctaccaattacatcgtaatcggagaagattgagtgctgaatactcgcaatcgtgtaaccggtaacgatattctgcaataccatttgagctggtgctatgtttgaaatcatttagatatatgcccatgcaaccgacttctcgccctttggtccctccgcctgaattcttggctgaagtgctctataaatccccaaagtgttcgagttgttggccttgtagtcgagcttattgtagcccaacaggtaactgtagttatataaactggtgatcttcacggatctaagcagtttattagtgttgtcccttatttcaagtgtgtagaaaatccctgaaatcagcccttcctcctgtagcttatcccaccctaactctaagtcaggtccaacccattctgcagggtcaggagaaaggttaagcacccggaagttttctaccatactaaggtttttagctgagttcaaatctacagaaattgttactggagagctacgacgaccattaatatcaacagcacggatctcgaaaattgttagtccggcaggttcacccacaatatcctgatacatcttaacattaggggtaaaagcattctgctgcacaatataaggatccacacgatctgatttacgtatcgagtagtagactacgttaggtgttaagctaggaagccatgaaagctctccatttttaccaacatcccctaccattcctccaggggtgggggtgtacttaaactctcttggaggcaggacgttattagatatttcaggtacgctctcgctactgttatctacctgcgttgagttaataaatacatcctcaccatactcttgaagagttacgtttatcttaccatctcttgtgttctcaacctcatcgactaagaagaacttcttattccagccgtaccgatcgtaggtgaatactacaggatcattaggttctataccaaggaatttgtaaggtaaagagaagctcagagaacgcgaatagcgagacttcttaagctccctatctgccaaacttctggcagtgtagtagttggttatgttagcaaaagaaagttgaagtttcttatcaactccacgatcctcattcttaaacttagagttatagaaggttatggagttggttttccagttcagggtaggatcaatcagagacgcctgaactgagttgtacttattacgtcctgtagtatctgagagatccaggtccccataagtatctaggaaattaagttctagaggagtttttgaatctttctctacggtgatgcggaagatacctgataggttattcaacgccccctggaatgattctaatagctcctgcacgtttttgaacacagagttggagttatccaggattgtgttcatttgcattatttgtctgttttcggctgtccagctctcccatccaacgtatctccagaaaggttgccaactagtttgataagaggtgtctataatgtttaatagatcggcctcttttctccagtcaccaatcaccattctgtctatcgggatacttgcaccaaaggtagtggaggttaggtagtcaaatgtttgccatacaccattttggctggttttatctgttctaacagagccatctgcctggtatacttttactttacgtccgcttaattctgctgatacttcaggaatatcagttctgttctccgtgatagtgaaacgtatgacagcgtatgcggtgtctaatagcttgtatctagaatcccagtactcgggtccattaccgttctctccttgtaggaagaaattgttagcagcagcaatgtctcttagtaccgtagctaccgtctggtctggcttaccgtggaatgtccagattcgtatatccccgttaccgtcattgtacttgtattcttgaccatgctctgagagagatgttgacggaagtcctgtggagattcttgccatagtatctcccgatactcttttttgtccaaagcatgtacgagaagtactgtcagtttgatcagtacagatcataggggcgtctccaaactggaagtcgaggaacccttcaatctcaccctcgcagaacgcgtaaaccacatacacaacgtttggattgtttctttctgtatccgcgaaaaccggaataccaggaactttttgagtaccatatactacaggaataaacttggccgcaaggttgaagtccaggtctacttctttagtaacagtctcgtaatactttttaaggctgtagctcttggagagaccgaataatttcttcttagattctagcttgtatcgttcttcttttacttgatatttagctaggaagttaacgctcttgttggcgtggaagaatccgtagtcctcttggtattccggtcgtttggcaccgtgagaaggtagtaattctccatttacaatctcaagccctcggtgggaggcatcatctgtgaagcgtccagcaactcgctcaaaatcgtagaattcgttagaacagttccaggttataacagaagtaccaactccggatactgtattactttctttaataccaccacccacaatcttacctctaaagaagagtaaggggccgttagtatctgggtccacaggaaggatttccccattgtcgtcgatgatcgcctggtatatagaaatagagcgatctaaaaatgatacaccactttgcacgagcttaatgacttcattggcatccgtaccggtaacactgaagctcaaactaccgacggttaacgtacggttttgtttgtgactgctaattgttttaattttccctgattggaagagtataccaccatagttgatatctctcatatagtccgtcatataagcataaacagcgttattacccgtggaccccgggagttcgatagagacaagatacgctaatcgtatcttgtcattgttggcaaggtaggctttcgcagaaggaaggatctgtctcatagactttctctcagaactaggttaaccccgtcgtatacaccatcaactgtgatctcttcgctgaatgaatctccgttcattaatttagtttggaaaagaatcccattgaaacgtggtctctcggagccgttggtagtgagcaacagatcagggtatagattaagtgtccatactcctgctacgtttttaaaagatgtaatcttatacacctttggatgtgtggttaactggaataaatcacctggcttaggttctccagataaggaattcgtattggtgataaccagtgtggagcctttttgtccagcggcaatgcgacagttgttcgcatcccctcttactcggtaagactcgtaatgtgggagtataacgtcgagatagcctctggtacgcttatactctagaattgctgacgaaagtacagcatactcgtcgggaaacatcacaggataactaatgttaagaccccagtactgagtggctgttttaacttcgttaaccttgccgtttggtagctcgtctctgatcactggatcattatcgatcagcgtagctttatcaaacccaaggccgttatactgaggatgtgtaaagggatctggtaatctcatgttttgttttctcctctcaatgttaatattatagtcatatcaagaaaaattttcaagataattttataaattccaaaaagaagggaggacaattacgtcctccctttagtttagttaattcaggttctttaagctcagcccttgttcattcaaggctaactctacagctgcctggaatgccgcagggttttccaatgcgtactccataaagctcttagcatccattgcctggatattcagattaaccggtcttctagcaccgccagaagaagtttcagaagctactttatccgctggagttactttggtaggcaccataggagttgcaacttccgtaccatgttcacccatcttataggagacacctggataggtattaccaccctctgcacgaggaataaatccgttagcattacctatacctttatcacctcgaacgtaggacagctcacctgcgtttgcgcccatgctaacgtctacgttcttctggcgctcacctaaggtcaggtaagaagcagtttcacctccagaccctgctatatcggtcattccagtagcactagacgcctgtgctaaagatagggcacctgcaagtccagccgcgatcatcagaggaatagagaacggatacggaacagctgttgctgcctgcattaccgctactgctgtctggatgatgatttgcttcttagcagattcctgctgaagtttaatcttctccgcttccatcttcttgatcttgttcttagactgctcagatttaccgtcacgcttctgctccgccgcgatagctgcatcaatagctgaaatctgctggttagtaccgtagctgatcatctggctaactgtctgcatgcccgctgcaatcatggacgtagtatccagagatccttgagagaactggatcatagcgttagctaagttccccatactttgagcagtagcagtagcctccgaatttagctgagagagcttaccgatagcggtatcgtatgacgccatctggttttccatgtcggcgaatttcttatcctcaccctcaaggccagtagtaggcgtatagtctgcgcccaaggactgtcctacgcgatccatcatctgtgcagtacgctgagctttgagagccgccatttgcgcagtagtgttggcaatttccttgctccaacgcgcctgttcatcagcgttacctttcgtgaattccttcatctcctggtagaacgctagctgctcctgcattttctgcgactctcccattagaggcttcatgctttgattgcgttcgaattcctctttacgcatctcagcagttttggcgttacggtcaagctgctctttccagatttccctttcaatcgaggcaatgttacgtctagactgttcggcttccttctccttatctgcctgagtctttagtaaggctaacctatctttctctacttgtagatttaatttaaggttcgccacgttatactgagaatctgtcatagtgcgattatttaagagtgcgatttctcgatctatacctactatcttatccttatagaatttctcctttttagtcgcttccataccctggttcttcactttgagctcttccgtctctaacagggtcagctctttttgaatcgccttgttgtccttgttcgtcgccagtacagctttcaatgcctcttttttcgcgctaagttgctgcatttctagggctctacccgcttcttccgccttatccttattacgagtggcagcgtagacctccgctatgcgcttctcaacatctagcttggacttagcctcatcattcactatcttctgatagttagacatggccttatacgcagtgttcatctcggttacagtggaatagcccagattaaggtccttagtcatttggttagccttttctgtagatccgcccgccaatgactcaaccgctttaagtgcatcacccagtgccgcagtagctctagacgcagtattggaatcttgtgcaaagttctggatatcattgctcagatctccggaggttttctttatgttattgaactccttccgtagagcaactgccccgtctaatgctgcgttgtcaaaggtgtataatccattacttgcttcaacgttctgtgcaatattgagttttcctgccagttctgggttttccttttgagccttagatagagcggaatccctagcatctttccatttttgaatagctcccgcagagtctgctaactcctgctgtaacatatacgcctgtctacgcatatctgcagtctgttgtgtaaactctttgttagctttagaggctcctaaggtaagcaggttaccgaacccactatagttggcagctgtggctagtgtggtggacatatccatcttcgcctctctatccattatctccttattaagagctgccagcttattttttacttcctctttcgccttaactgcttcatccaagcctttctgggaagcctcaaggttcataaccactgcgttagagtctttaccgtccatctgcttaatcgactcttgctgggcagtagctgcctctgcagataccgaagccttagatgtgtaaaacgccgcgtttatagacgcaataactggaccgagatatttagccgccgcttgttgaaccttgcgtaatgcagaatccgcgttagccgcaaattgctcccaaggggttgctcttagcacttcgtcaaggtagccgaaacgtttagtagactccgctactaccgcattagcatacgcctgctgcttctggaaggaagttaggccctggatattatacgttataccagtgttagccgcattaagtatcttaacgtattcggcatacgcatcatttaaacggatggttacacctaattcgtctagaagttcaatttcctgcttggacacacccttgattacacggttgagtgcatcggtcatatcaactccgagagtagccgcggccctacgtgcaactagagcaaactcgctgatctgtttggcatcgaaaccgtaagctgccgcagtagatgcctgacgcattgcctcctcaaaggataccgcgtggccggtagcttcctgcagtgccacagcaagggactgaataggtgtacctgtcttcgcccctacgatagagccaaactgttctaagcggttcagctggtctccaagttttagctgatcaaacgctgccttaagcacgtatacgttagaggctatagcaccgtagataagaggcatagggccagtcaccatagctagtgctgcgaagttcctagtagccccacgagcagatcctgaagtatttcccaacgctctagacgccctattagcagcgctacctgtacccgttaacgttgagttcagcccacctaaaccagtattaacatcacgaatacctgcgttcagatctgttaatttgtcggataccttgtccgtactacgtgccatatcggccatggtggtgttcattttgttgcccatagcttcaatggaggttacaatcctgttcatttccgccactaaggcacccatattgaacgctgcagggttaccacctcccccagcttgtccgaggcgtatacgtttggctattaacttatctatcgcagcagcagaacgtatcgcagcagcttcaatagcattgagctccggtaccactttctggaagttgttaatcattctcgtagatgacgaggttgatttagacgccatatcctgaaatcccttggagaacccgcgttctagtatttgagacgtagaggccagtttagtctccaaggcatttaatgaggccgttgcggcattgaattgcgctggtaattgaagtacgcccctgcctgcctgtatttttgacagagcggagttaacttgcacagcggccttagccagctgggtgagtgacgggatcatacctctgatggagttacccagtggattcaggtttcccgtacctcccatagtggcaaaagctctagatagatcatttaggcttttctcgataccggttacagatccttctaactgagcacgcaactgcgtcattgaagtacctatctttccaacaactgtaggtacagaagaaagatttgcgcctgctttaatactttgcagtgcttttcctgctgccgtagcatctacgttaagctgttttaaagcggctgttactttagagatatccgaagtggaagctgaggtggctgttgatatctctgagattaacttgctcagaccactaccggttcctacggttttcattgaagcggcagctgtagcggtagaggatactaaagacgtaagggctgctttaatcttagatatctcagctaccgaggtattggctgcagtggctaaactagtattaatcttctggatttcagttaccagactattcagtttggtccctggtgcaatatttgctatagatttactcgctaaatcagcttttactgccaactcaagaagtagtttgtttagcttgttcacctcttcgcccatagaagatacagctacggaaatccctgacgcagccttactcagatgctctccggcagtccctaaggagtcggctttcagcccctgaagagacctgcctgccagcacggcttgctccgccattctagctaattggttaccaatcttttccaccccagatactaagtagctaagatccgtactagccttagcagcactagaactaatagattctaacccagcccctgccttcaaggtctgtaacactttagctactgaagaggcgtgcgcatctaactcctgaagagccttattgacgcggtttaagtccgcaaccgaagaagtggctgcagtgtcaaaaccagaggccattttgttagcggcggaagtcaccccgtttaggtttgcgttgatttttagtacggatttagccaagtcaacctcgaacgaggtaaacttgccgcttagcatgccgatagacgctgctaatgctgtaatgctggtggtcgaggataatttctccagcgacttagcagtacgtgatacagatcgttccagcgccgtgaaagacccaggaagtttgcccaagcttgtatttagaccctctgagctctgagcagccccgtctaaagcagcttcaacatccctgatttgcttagcggctttggatccaccacgctgcttgatatctacaagtaattctcgtattagtctatctgtcatgattttttccaataaaaaaggcctagggcattaaccctaggccaagcctcacgtggaacgcccgttggaggaaaatgtaactcactatctgctagaagacttcattttagacttcttaatagctgcttcaacacgtttgcgagaggctgccacagcatgtgagtcgaatatgttgatgatctggagtataagactcttctcatctggatcctcgactccgtagatatcgaagaaaactagtagggcacttttatccttgcctaaataggttggataatccccggggatataattgtccgataagttgttatatattgttagagcggtctgtgcgatttcagggaagtcatggatctctacgaaacgtttaagtacctcggggttaggttcctccccgagagattcgcacatagtcagatactgctcccgtgtaatcttggagtcccctcccttgacacatcgttctgcaaaggcgtctatttccttaagcagtaggttccgattttgaaccacgaaaggtgtctaggtggaagacagtgctattcatccaggtctcgaaggcgctggaattacgtaccaacatcatcgcgttgtcaatactaaattctaccttatcctccaggcgatcttccggaacctcgatcagcattagtttctcaacatctgcgacggttagaccttcccaacccgcaatagccactttgacgaactcttctgcgaatttgtcatcgttttgcactttaacagcgataccattaacaaactggttctcttgtgcagcttccaggattttcttggagagcttacgggagacgtagttaactttcagtttgaagtggggtaggccagggtatgcaatggtaatctgtttggtatccagtgcaatatcttttaggttaatactcatttgttattctccaattagcttgattcggacaggatctgattgctcagtagggatcacatcgtaatcgatcttgtacacgtcggttaagtctaggcgttttgtgattttagtggatggaaagtccaccacaatatatttatttctgatctgtaccggtaggcccacatcaggtttaatgttatgcgtagaatctatatgaagactcttcgcatagtacatcgatatcaaagcagatgagttcaactcgttaacgattgctctcctattattataaatcttattgatatcgaataaacttctgtcaccacgccattcgcattgctgctggaatgacataccggctgacataagtcctgggagcactctcccattcgaagatacctgaggtaatgaaaatggtagcacctcaccttgatcaagcgtatagctgttgagtgggtggcctacttcctcaaagtatcccgactcgataccaacgtttagcaccgggacactcttatctagagaaaagtcgcaggtggtagcaaaacagttatcgaaacgtaagctcgtgttcttgttaataatatatacggagaacattttaggctcaatattattactgaacaatggcatctgatacattccgtctatctctataaaccccatcagctcgaagaataggccttcgagagcattactagagaagttaagagttagagaaattgaagaaggagactgagcagttatcttcgaataggcgtagttactgcgtctgtgaatcgtcctacgatttgctttaaactcttcgtaggacgttccagcagtgtaatcagacagggcgtcaaatccgtacgccctgccatcgtactcgatgactactctagactcccgcattagggagtatagcattagttatccttatggtgtgacagggttaccgtcaccagaggtaatcagtttcgcgatagaagtcttggtgtatttagaagagaaacctaagtaaccttcatcaccagcatccatctgagacgggatagccttgaactcaatagatacacccagcacgtcatcggtctcgatcgacgggatattcaggttagcgtgcttagctaccagaacggctgccggacgagcagtatcatattcaccacctaggatgattgctacttcgaaatcgttcacagctttcaggtcagaaaccagatctttatacagctggatagagccattggcagcatcattcatgtatgcagtcagggaaccagtcagttcaaaggacccagtgaaggaaccaataggaacatcaacacgagacatgatgttaggagtcaggtacgtcacgttgttgttcatggtgaaagaacctcccgtgatcgggatgttataggtttttccgccggtagcgttgttcttcagcttaagaatggtcagtttgttcttgatataagaactctgaatcttagcataaagagcgtcgtctatccctatggttttagggtcgaacggctgagaagctagggtctccaagcgagtaccattacctgaccaggttacacgcccgatatcatcaatatctacgttaacctcagcttgcccaacctggcagttacggatcacagaccaagagctatcggttaggatgtagatgttcaacatggccagctcgtggtatccattgtctttaaagttgacaaccaggttagtagcgttttggaatacgccagtagtacctgctagattcacggcagcgccagttgacagcccgtgccacagtaggtagtccggtagaatctgtttacctgcgtcgtcatacggcaggatataagtggagaagctccactcagcagcgttcaatgaatcgttaaagcgctgcgaaccgcgggtcggcttagggccagcctcatttagggtaatatcagtggagttactgtcctggctccaggagacatcatcctgaactaggatctcctgagtgttggccttagtgaaccccgtagtaacggttgacacgaagattcgtgtattacgtaatagttgtacagacatttaaatttctcctgagctgtaacttatctatccagcgctcttctcagaggcatataccggactgttacgttaacttgagcaaaaccaaacggggacagtataccctcgtctgtggacaccgacgtgatctgcatgtcagtggcttcagaatcgatagttgaaccatcaggtttcattatagtatattgtaaatttcctccagtgtcaatagaggtttttacatccgctatgagtttctcaagttgcatgttaatatcatccttttctttatcatagataagaataggaatttcaaggtaaacccactgctgtgcagacggcaggtagtttccagtttcggtacccacgtggactgctatgtaagggaactcattgatctgctcaaacgaataagtctggcgggatacgttcccatacatattagtaaagaactctgtgggattactcccgtccatgtccttcttcagtcgttccactagggcatcagcaatacttgttctgtaattcattatgtaccctgatttactcttatccggtatctagaatggataaggtctcttgcagccttagcgattgcctcgccgatcagcttctgcgggttcctagcaccagggaaaggccgtagggaaagtccgcggtaggtagagacggcaggattgaacacagagtaaggcctaagcatgtagttatacgtgatgttgaggtcaggattctttgctcctgcgtcttctcttaacagcacatctttaatcttcaaggaattagcgaaacgccccgttctaaatttaaggggtgccccagcttttttcatatccttgactaagtattctttcgctacgagttcaagtaacgctctaaggtttgtgtttgagacgaaacgcccagaagcgccagaaatagcaccagcgtaaccgttgtcagcatctgaaggatccccaaagttaacctctaccctaccggtagatcgttttcttcctattttggattttttaccagtgatactatttagaaggttatcgataacaccaacgtcgccttctaagttaagtgacgacgagacagcttttaaaatagaggacgtccgaacattcagtaaatcctccgataccggcttagtaaatcggaaggataccttgcctatggtgccatctttgtggttatccatagtttccgcactatatatcacggtgttcttagtagagtggctaccaccactcataatgtccagctgttctttaactatctgtcgagctagatcgcccaacgccactacagcctccggtatacttcgattatggtacgaatatgttccggtacgccagatttagtggtattgaaagtaacggtttctccgccaaatgtacgagactcgcggtagtccttcttgacccaatgatcgactaggaagcatgctgctaataccaggtcgtcaggaatcgaggtgaagccggtctgagtaaactctacttccatatacccctctggaggagagaatttcagcaagagcgtaccatccgggtagttcttatattgcgacttatcgatctcctgatcgttaatcgtaattttagtgatcgtgctaggcacgggagaagataggaagtactttttgcgtgctggtttagtaggcagaacgtctacaacgttagcactatcgtctatacctaggagctgagtaatcagagcattggctgctttgattaacattgggatatttgactctaagtcaggacgtttaaggcctccatatgttctccaatcagaatctgtcatgaattgcatattttacccaataaaaaaggagagccgaagctctcctttagtcggcagtatagccaaattaagcagcgtaagcaccagcaactacgccgttctcgaagaaacgcatcaggttcagacgctgagtaacgtagtacgcatcgcgctgacgttcagcctgacgctctttctcaacggtgattgcacgctgacgaggaacgatgaagttgtcacggtaaacaaccacacagaactcagcacttgcagccttagctgggaagaactcagaaaccagtaccggcagaccgtagatgcgaccaacctgaccctgcagtttgatagcggtggtagcggtaacctgtgcaacgtcctggaactcttcatcttcgatcagatcgtagtaagcatccatcgaaacaaccagagccagtttgttcagatccagaccgtggcggcccagtgaacgacgcagcttgtgaatttctttagcggtaactttaacagaaccgtcagctttagcagtggtagcaaccactttaccatcgtctttagcgaactggatcagacctttcggagtaccagcagcaccagtaccggtcaggaacgctttttcgattgcgatagcgtgggcttcaatcagacgacgacgcatgatcggcagcagagtgaagatagcatcttcttctgtttcgtcggtcatatacgctttagcagccagtttataggttttgaaggtgatttcagacagcttggttttgtcttccgcaccaacagtagcaggagtaccgtaagtagaggcgtcaacccagctagcttcaccagcttccggctcaaccatcatggtcagcaatttgctagacatcggcagttcttcgaacatggtaccgataatcagtttagcctgaatgtcacgcaggatacgcagggagaagatggtttcgtacgcttcggtagaaacttcgatagaagaagagccgttaacagctttcaggtgggcttcgccacgcttagtaccgaatacgtctttctgcattacgtaggacagaagaaccagtttctcaacttcatcttcgaaatcttcctgcttaccaaacattgccttagcaacgccatcagctacgaaagaacgaccgttttcacgagcggccagcagagatttgatttcttctttcagaccagtgatttcttcctgctgggagttcattgctttaacgaacgcttcagcggactgtttggatttctcatccaggttttttacaagctccagagcttctgccaggtttttacggtcttcaccagttgctttagcaaccaggtcttccatacgcttgagttctttagcttcctgctcagcagcaaatttgcgagcttcttcagctttctgagaggcggttagacctttaagctgctcagcaatgtcacccaggcccagatctttagacagttgtgcgatatcgtaagacattattatttctccattatcctttagcgtaaccagcggctactaggaatttctctaaattagaaagttcaggttgttcaacaggctggacctgcgaagattttacaaaagacttacgaagttccatgtaatcattatggtttacagacttcgaaaggctaaaagttgagtcttggttgcagggaaccgagactacagagatctcgagtaactccagatctttaataatgaacgtttcagtcatatcgtcccattcggcgtctttaatatagaagcctacagagaacgttttaagaacctcatcacgtattaatgagtaaatctgtagatcagcagcacttacctcaccctcaaccataagtccggactcggttggcaccaggtctaggatcttaccaattgggcggctatggttatggccgaaaagcatgatcgggttcttcataaaattcttgagggcgttactggtagtccacgcttcggagagaataacgtcgccggcgcggtctttggtaatcgtgttagcataccctttgatttttaaaggaggattatcaccctcaccgacagctttaacagatttaatctcagcattaagattaatattctgcatcgtttgctccaaacactttcgtgttgttcctcagttttcagatactattattacataccaaatcgcgaatgtcaaaagatatttgaaaatcccacacggtgtgtggaattagtaggcagtcgaaattggttacactgagaataaattttccacttgcacagaaaaatggggagccgaagctcccccagttatcaagtattatacaggcgcagtaggtgccttaactgttactgtagcagtgtcggtcttattgccgtcagctgttttaacagtaataactacggtaccgtccgcagctaagttggagggaacagttacggtaccatccgcagctacggtagcttttgtagtatcagcagaagtataagttacagacttattggttgcgttagctggggctacggtaccagtaagtttgccagtcttacctgcttcgattgtaatagtcttaggtgacatagtgacaccggtaaccgctacaacaggagctttgacctggatagacacttcactagatttaccacctgcagtggcagtaattttaacagtgcctgctttagacagtgccgtcactaatcccattgcactcacagtagctagggtagcatcgctggtcttccacgttacagttttgttatctgcgtttgcgggtagaacagttgctgtaagctgtacagtcttagtatagtctaatgatgctggagcgcctgtgatactaacagaggctaccggtactggtttagttgcttccgcgtaagcctctttaaactgtttccaggttctacggttagtagcagcgtacccatactccttacgcagaatctggtaagtaagatgcgctttaacagttgccatcacattgtgcggctctggcagtccgttagggaatagtgcttttaaagcgttataatcaatcattctttttcctcgtctttatttggtgcgccaccttcttgtccacttactcccgtagctgatccagctacgttggcagggatgcgaattttcttcatctgctcgtcagccagttcctcgtaaccaagctctatacgaccttcgttaccagtaaggataccattgttgactagtgcagttacgaatttagcctctttctccttatcaggagttagtgctactacgtctttagtattgggcgttactttaaaaccgaagaagaacgtaagagagctacatactttattgagcataggcacaatagtcatgtagtagaacagctcaatgttcggtcgaatattggcgttattacctccatcgatcagtagctgagggacaccaagagcgatacatacgtctttattaaaacgagcgatatcgttttcgaagtcgagatctttaaaggaggagatttgggagtatggcttagccttcatcccgccgtctagaatgagcacagttgattggccggtactagggttatagtccagctgaagctcttcttgtttacgttcacggagctttttatttaggatttcatccgtctccaggataagaccgataaccgtgccgttgtccaggaatttctccttgaactcgagcattttctcacgcttagtaagcgagttgattacggtagctacgcgagactggcctgtgatctgggagttaataccaccattctggccattatctttgatgaagataatctcatcaacgcgatagtcgatcatattattaaagacaaatttgttaacgaattttttgtcatctgcttttacttccattagggcagcaggcagatggtacagagacgaaccgtcccaatggatatacgcacacccttcgaatagaaggtcagacactattaggcgtctaaaagtactagagtccatgtaagggttagggcgaacattaagcagcgtctcaagagttttactcctgatcgtgccataggttgttattgttttatattgttcacctacggtgtaggagcactcagcggcgctgtcaattaccatgttcgcggatctattaaggatctcaatagacgaataggctttgccagtcgtgaatggcttgacgttagtacggtgactaacatcctccaagtccctgattatgcgttgtccgcggtttagtttagtaactaaccagtcacgaatagccattataggaaccttgcgaatcctgatttctcagtcttgacgtcagtcggaagccacttcgcaaagcctgatctttcgccagtattgcttgtacgaggtgcctctggattcatacatctttcacgttgtttctcaacccaaatcttctgtttgttagctgaaaacaacggcggttctttcgtatagaccttgtgcagggtctgatgatgaaagacacataaggtgaccgtgtcctctactagctcatgccaataatgttgatagaacttatcccgattgcttaggacgacttctgagtcagtgaaatccagttggaattctttagcaaagtttttaactagtaaggccacagtcgagtagtggtgtagctccaggttttcctgtgagtcacaaatggcgcaacagttgcctcttttgtactgggctttgattccgtcacgcattatggagattgcatctctcttatattttacattggaagccaaagtgtttctcctcttagttgggaaaatactacttcgggtacagcaattaaatattcctctcattcaccctgatgtctatgagatctctcaaggtatgaatatattataactgccacacacgaaattgtaaagtgaattttataaagttggaacggaatttgtactcactactatccgttccaactcagctcttatttgccacgggaaatcgagtagatgccgtaacgcagtgcgtcacataagtgagagttggcatcatgacgaggtttctctctggagagcttctcctccccttcctggaagtcccacttgtagttctggagtgcgtgaattaacgcagtacacgaggcgtcgacaatgatcttaccctgctggaatagagcagctaggcacgctaggccatctagaacagatttcttggctggggcagaagatatctcgtgctcgtatgccaagtcctgtcggaactgtgcggctgcggagtcaacaaagatacggtctacattataccggtctatacagtgctgtatatacatggcatgctgtgctgtagtcttctctgcctgctggtactcctcaaggatatagtacacatcctggtcatagtggtacttaatggtaagtactgctgtcgggtccctgtaaccaacgtcgatacctagaatagtttcgaactcgtggtctgctgcaaagaagtgacccatacctgcgagatcctgtacatgctcggaaacgctaaaggtatcgtagatctgaccttcgaatacagagaagtccgcctcgtattcctgtttgaaatagttcttagatacagtcttacgtgcttcctcgatatctgcaagagatacgcgagggttatctcggtatgtaccgtggattgatacccactgcggaagatcttctcggaatccctgctcgtagaaacgtttgaaccagttaccgccacgaggagtagagataaacagagctttagagttaggcttgtccagtgtaggacggagctggatatcaaaagcgtcaccaccaacgtcagaaattgctgcttcgtcaaagataataaagtcgtacgaacgaccaactgcggagtcagcctgcgcagcggaagccagcttaaagagtgaaccgttagcaagttcaatttccttatctttggcgttctcacgctcagtttgaaggccatatttcttaatcagacctttgatctgcgcccacccgatgtttgccagggagtagttcggagctactacgagcaccttaacgttcggctctaggagtttaaggaagcctagagtatacgcaatgaacgacttgccaacacgacgtgatacgcatgctgtaacgaaacggtgacgcgggtcttccagtgcgtttatgattgcgcactgcggaccatttggggtgatgccctcggtggccagcaagccggacaccgggaatttaaagaatcgtttatcaacaccaaaatccaccacgtcagtcgtattaatataactacgtgagatctccattatttaccggcccccacaatgcgtgacaggagatccgtgtagttagagtcgtgaccacctgccaagttgatctgagtattagtctggtgtacaggagctttagcctgcttcaccttctcatactcgatctgcatcttcatctcatccatcttcattttgtgcatgagtttgaggatatccataatatccatctctgaacccattccagtttcatccagttcctccattttcatagttagaacagtgtctagaatgccgaagaatttatcacggttacggaagccagattccatgaagatatccgtaaggtacgctttgacctcaggtttacgcataatatcacggaatttgggttcctccataccaacagctaacgctgctttcgcaacgtcgctgccagactccagatacgcttctataactagcatgccttccggagacattgcatctggtacaattaaatcattgctcatattgcctcctttaggcaagcctttgcacagcaatcctaacctcaggaagaatcacgcgcatgttcataatattgctcatctcaacgttaacccaaacctcaacactaccatcagccctagctatcagccaatagataatggcataatcgccctgagtggcagagttggtagtagtaggtgcccacatagccttcatttgcatggcgttgttcccaggaataaccccacactgagttacggtcccgcgtataaagtggaacggcacacacatgttaactggaagacacatgatttgatgcacgcgtttctggaagtgatttccgaaaattctcagcctactatctacctcgctccactgggtaagatcttctagagggttataacatccaatccctgcagcagcaatccactcatcgtttttccagtctagagtgacgacgcaagccccatttctggagttattaacccctaaccacaaggtagccaggtggtgactagcattaccgctagtacgtaggttccctccaatatcagcagagccggtaccgcccactaggcgaagaggtcgagttgcttcggaccatactggaccccactggtttccaatttccggtgggttagattttacataccactgcgcatcagatctaaaattgtaaactcctacagtggttacatgcatctcacttatgttaccttgcccaaactcagcaccattatctggtcgagttagaggctggttgaagtgaacatacccattattaccaacagtagggttgccactaaatctggcgacgttggttgcaataactcggatatcaggcctattacctgggctgtagtttatatcgttctggtttatgaacttccacccagtgttcattaggtttataccgtttacaatgaactctctagggctgattttaatctcctggttgcgggagccaaatacgttctctgcgtagaacccctgcccattgtatttcatattagtaatataccagcgaacacgtttaggaacacggaagttattgtcacggtaaatggcattgttaccccaaccactaccagcattgttgttatctgtgttctcccaccccataaagttattgggcggaccacggaaaaaacctgctttgtactgaacctcctgataagactcagtctggatgttatgagcataaggaccaccaacgggattggagctctgcccatatctaggccccatatgtccgtacatattacggttgagagtctcaccacgcaaacatatactattaactcctgtggtacgcatccatgggtggcgcatagcatcaacaccaatagtaagaggtctattgggcggagacacagaaccggctatattgccactaaaagcccccctatagagcacccatccagctttaataatagtctcaaagttaggacgtataggagctccaaccggcggcccaggccctctgtctccccattctgagttaacgccccaggtgtacatacacccagtaccgtctcgtagcttctcgttaatagtacctggcgtctcttcgaaatagaaactaatatccatgtgtaagtctgcagaagcacaaacgttagtcttcatactagccatagtacctgcagaagcctgggaaccgacagtattactaaagtaagcgttatacgctttagcgcccacacccagggatgtaccataaatgaaacgtctagtaccatcctcaaactcaacttcagtcaatactactctgtcgtaatctgcggacagtacctgaataatcctatctggcattctagtacaacgataccaatcaccaccatcccagaggtctctttcgtgagtttctaaaactacaacgtgaggcatatcgctatggaatatagtatcccaacctggattagtgtggttattaacgtctttattgttgccagaggtaagagacaacacttttttgtcgcctatccttcctgcataaaagcccataaaaacctcaaaatctcacttgctaacaagtgacttttataatataatattattataaattaaatcaaccgccaagtaaaccagattttttaaaaccatctaggaggaccactatggaagtagttataggagcacttgttttactctcaatcgtactatttgtcattaccgtaaagcagggtaagacaatcaaacagctagaacgcactaacggggtgttgcaaaagtcttacgacaaccaaacccgtttgctgcataaggcgcagttaaacctgtctgaatgcaaggcagaactagaatcagcaaacaaaatctacattactaagggtatggtgtaaaacatgactattgtattaattttcacaacattctttttcctggcagcagtttggtttggtgtgcgagcacatgacctacggaacgcggtagtagcggcagatcttcgtaacaaaagtctacatcaagagatccttcaaactcgggcggaacggcaagtagctatctcgaaacaccaacgagtcatgaacgatcttcggaatgacccgagcaacccatactacatccctccaataacaccgcaggtagcgagacgcaaacagaatcggggaaactcgggaagttctcgaaaagtttcggggagtccttcatctaactcgggaagttctcggagcgatgacgggtcgacggcggcaatcatagctacaaccgcggcagttgccacgtatagcgggtatgactcgggaagttcttactgcgacagcggcagtagcagtagtagttttgattcgggttgttccttttaatactccctttagccttttctccaattttcttaaagttacacatgaaggtgggctcagtgggtcggggggtggtatggtagtccgattacccccctagctaactattagtaccctaactatttcgctagggtactattagctttc

SEQ ID NO: 57 - DNA, 170737 bp, unidentified
  source 1..170737: mol_type = genomic DNA
ttagtaatggctaaaaccatatgtaacatcaatcatgactttataacggcatacacgcatttttgcgttattgtaatccactgggatcgctaccacgtcagcaggatccacctttacctgaatgactctaccaacaccgcccccgtagtgtggaaggtatgatttagccgcaacgtgtaggccagtagaacaggtgcgcgttttatcttcgtctaccatgtttcgaggcatggagacagtcacaccaggactattatcaaatttgccagtagcgagatctttatagttatcgcgcacacgtttccaggcaaggaaacaaccatcatcggtcagttcaatgtcattatgtacaaggaacccataaagctggtatacagcatcgcgtgaagggtttcgcatcaaccgttcaaagaagttcaccagatgttcatacggacgatcgttatacatttcgcgaatgattcgttgagtgatatcagaatcaaacactacatctttatatagaagctgatgaccaatgattttaatgttgcctttgctataggttcggatcgcttcttgagtatccaaacaagttacagcacctttgacatcaccagctttcagcatttcatgcgctttcttaaagttcggatgtgtttcacccgccatgaaaacgcgcccttcgtatacaaccgtaatgaacgattcagatccgatcatacgcggtacagtgtctgatactttaggcttttgttttacatcccttttcttagggaattccgctaacttgcggttgataacgcgcccaatggttcgggcgcttacgttgaactgttgggccagtgctgttttacttgcccccgtcaaccatccattatagatagctttctgttgtacttcgtcgagaattttgaccattatttccaccgtattaatttcttaaactcactgagattcttttcgttgttgtaaatcggacgaattgaataagaatcgctatgttcaacaagtgaagccagtaacgggtttagtgatttaaagatttcccatgcctgatcaacacgttttttcatattgctgcgtttaacgcgcattgatgctacggattcacgcagaatcggacaacgcaccctggaaagatttttaccatctttctcatacccttccagacacactatacgttcgagggtatcaacaatcttatacagtttttcattatatcggtttttcacaatccgatcaagcgatacaccgaaacggctatgcaatgcgtctgtttctgttgagtgatccttcccaatccatccaggcaagcaattatctttcaatgccttttcagatttaacatactgcttgcacagcatatcatcaaagcataccagatttgaatccgggatccacttccagaggctgttacgtatagcaaacacaacagggatcccagtatggcgcatgatacgcgataaagtagattctttcattgctgaatccatagacaacccggaattttcaccatctaagcggctatattcatcaataccatacaaccgaacacctggggctttatccagtgataaaaactctgattttgtcataaacagagaagtttttgccagattgccgttactatccaactcataacgatatacggtcggggtttttgggcgcggttctgaatttttcggtgcatatagcgcttttgatttttcgcgatctgcatcatagatctctttttcttttgtcatttcactggtacggagatacacaatttccgattcatcaaaatgacctttccgaacgatatcattaacaatctcacgctttgaatcactatcgtaatatgcaacaaagctaacacggcttaggttatgcattttagcatacccgacgatatacggtttaaccgtgttggtatccacttttaacagaatgagtttcttctgtttccacggataataaatgcgtgtgatgtcctggcgtttggttgtttctggcttatacttgctccagcggcctccgctaccagttacctgataccatgcatctttaccgtcgtattcgttcgcccaatacccagcaacataatcatcattatatttgtttggtttgactagttcgctatggatccagccaatagaatcaccattgatgcgaaaattagcatctttaccaacaaagttttgtaccattgaaggcagagaatggaaccacgtcagtttatcacgcacggtttgtaacttatcgaattctgatttaactcgattgaaatatacccggctgatttgtttcagacgttctttaacaatccctactgtcattttatccatactcaactcttcgcgagaaggcatgaaatcaagttcaccgatcgggaagtcaataatatacgtatactggctttctgtatagcaatagaacatcgaggtatcatacaaatctttatccagaggataaatgatgttacccatgcgagcatatacaccgctagtgtatgctgatttatgacggatcaccccgctatcgttggttgcttctttcggctgatagttgattttgagaatagaagcaccaacaaagttaggacgaatatcagtaaatgattcgtatacccttgctgcttcgttttcccattctttgatatcttcaaccttaaccggaacggtgatagtaaccccgttaggttcatcgctttcaatctcatacagaggatcgcagaacggttccccatcatccatatagattgtgtaaccgcatttgataccgtcttttacagattccaccgtgaaagcatcggaatagcaaagaggagatttgcaacccagacccatagaaccgatcaggtcgtttgaatcatttttagttgattcgaagtaaacggtaaacgcatcactaacgaaatcaggagacataccgatcccgtagtcacgaataacaaaacgaggatcaacagcagttggcaactggacatcaaacgggttctgatttcccgcttctttgtgtccatcaatcgcattacaagacagttcgcgaatgattgcgcggatcttgtatttgtatactgtcgaagaaaggatcttatacgctttcttgtttgcgcgtagagatagtttgtttcgtcccttgctggtatctgtaccaacacggtagatggtttgcggtgtatcttcgcgtaatttcattgtttatttctcacttaacattaaaaataacttggtcacaagagtacttcgttggctttttgttcagaccatattctactacttcacaataggtgtcaaggaattttaccaatttttcttcctcgacctgctgtttcttcatatcaaggataccccacacgatagccccgataatgacagaaaagaacgcacaaaatccgaatatggtcagatattttcccaacttaggcgcattataacgtgtcataccttacccctctttgcgaatgtatgcaagttcttcatgggttactggacggatatacagacggccttttgtatatgccttgcgcccgctgatccaaatgtttttcatatccttaacaccgttcatcacatcgttgtaaaacttcttatcagctttagcctgatagacttcacggccttgataatctttcatgaacaaacaataaaggatctcgttcttatcaactagattagcatcctttgtagttgttttacttggtgaaggtttagcacccaggcgcaaggccatagcttgccacactttaccatgttcataaccgcgcccgacaagagcatgagcgatttcgtgtaaaagagtgtctaaaatatcctcgtagatatcttccgcaacatgacgaccagatagttcgatcagttttttggtataactgcaacggcccagagtttttgtaatgcgtccattgatccggaatgtccaaccattactgatcaaaccgtgtttttccatcatggtacgcgcccagtgggttacttccattgcactacgagttttcaacattttagaatctcctttgcttggtacaaaaccaatatagcaaaaagccccctgcattgcaagaggctttgtaattatttcaacttcttagaaagttcttttaaatcattgagatactcaattttaggggttgtttcttcccagtatttcaattgtttgcgcaattcttcggcttcgtcttccagcttttttctttcgtccgtggttagatggtagatgttcatagccactaacatttcggcatgattctcgcaacctatccacgtagacacaaatttaaccgcttcgctgcgactaaggccacgcagagaatcaggagattctaccatttgagcaataaacgcaacctttgccagtgctttatctaacgcttccttagtttcctggatacgcttattgatacgctgttgatatacattcatacgaatatcaacgaaatcctttagaagcgtttcagggcgttcgtatgagtatagtttgccctcaaagataacgttaatgtttgggtttgagttttcaatcaagccgaaatctttcaggatcttttcacgggttagcccattagcatactctcgcttgagcgttacttcataccgaaaatcttctttcgatagatccttgtagctaacgataacgcctttttcttccagcttgtcaaggattgcaatgtatttcacacggtcatatttcactgggatctcagtgatcaccaatttggttttaccttgcagttcataggtgccgtaaatcgtaccgtctgtgatttcacctttaaagtaaggatatttcagatccagagtgaaatctttatcattcagatatgcaatgcacccgttaacaaccgatttaggatcatgaggcggaatgtttgttgcatatgcttttgcaatcccgctaaacccgttaaccagtaccatcggaatgatcgggagatagtacgctggcggtacatgttccggatcttcatgaactggcgttaaatcaccatccatataaattgctttgaatattggcgatagtttacacttgatgtaacgaggtgcgccaggtttcttaaccaaacgggaaccaaagaacccatcacggtcgaataacggaatgttattgcaccagtgcgccgccataagggataacgcttcttctacagaggtttccccgtggtgatatccatacatagcaacaccgccagcgatagaagctactttctgaaatcccgttccgccctgcatagcagagtgaataaagaaacggtgaacgggtttaaacccgtctaccaggtgcgggatcgcacgtgaataaatcgtataaagggcaaacgttagcccttccacctgtacaacatctttaatacttctttccattagtcaaccttagaaaatttgtgttttccattaacccaatctttacgcggatcagattcgtcgccgaagcatagttctaacacttctttgtattcgtcgtcaagtacaatgacatcatacttcaactgatcacccagaacacggtcgtaatcttctttgcgtaaagaacccagccccttgatatatcgtacatcttttgctttatcgcggaacggtgcaaactcatcaagagaatagaaccatttttcctcgcgcccaactttagcgataacgatcggggttcgaatatatcggatccgtttctcagtgaacaaagaaggccaacggctaaagaatgcaagcaacagagttaaaatgtcgccgccgtcaacgtcagcatcgaccatgatgccgatattatcataagtcattccggaagtatcaccaggatgaatattgaggatagccattagttcaaacagttctttgtttttgataatgtctgtaaaactcataccccatgtattcagaggcttaccacgtagcgggaaagcgccttgtgtttcttcattacggcattcgatgaactgaccaacagcggaatcaccttctgtcagaaacaatgttgtttctaccccaggggtatcaataccggaagccggaacgtgtttagcaatttttgccttttttgctttctttttcgctttagtgatcgcggcggcttctgctgcttgtttacgaatcaatgcggattcaatgatcggagtaatgatttctggggtatccataatcatttttgcgatctttttgtagttcaaattcgcatgattgttaaactcacctgctgtatttgctaatcgctcttttgtttggctatcgaatgcaggtgcattaaagttatgcaggaataccacaagagttaagcattcttttacacgtgctttcgggatctcgatactatgctttttcttgatcatcggttcaagttcagaatagataccatcaatcatacactcaacatgaacaccgccgtttttcgtatccagaccgttaacaaaggatttctgtttaaacccgtcctcagtgctcgccagaatgaagctgaggcgattatttgtctggacaatggttttatccccatacatggaagcgtacagcgggaagcgattagagagcgtttctccgttatatgtgaatttcacagacgggaaagcaacggcaagggccattaagcgatccttaatcacttctttggtttcttcatcgataccagttacaccaaacatagagaagtctggagtaaacttaacagtagtaccctgttctttactggggctggttcggtaatcgatgttctgtgcgccgtccgtacagttaatggttactttgcgtttcccgtttgcagtctcgccaataaaaatcgagctataacagtttgtcaggaaagaaccaacaccattcatacccatcgttacgcggtttttatcatcgaagttagaacccgattttgccatagtccatgccgcaactggtttagggactattttcccgtctggggtttttacatcatcctggggaataccgcgcccgttatcagagattttaaccagattatgatcaatggttacatcaatcttattagcatgtttgaattcagttcggatcgcttcatcaatcgagttatcaaggatttcgttgatgattttaaccaacccttccacgtactcaaccttgcgatattggcccattatgaaacgttcatgcgcttctttgttaaccgatccgacgtacatatttggacgcaaccgaatatgatcgcgatcgctcatacaaaatgattcgtcaacctttgcgccctttttggctggttgtggtttctgttctggttcatcatctgccagaagaaaatctaaactcatattcacctctttgtttaatcactgacattatatagggttctatgaaaaagaaaacccctttcggggtttacttgttataagggaaaccatcacgaaccatttgaggtttatcaactgttcgttttgcttcgcctccgcaatcacaatctttcggtgcatcacgggtagcaatgcttgccatttttggaaattctttattacacttagtgcatttataggtataggtaggcattaataaatctcttttaaactcaacatcttaactaaacgggctttgtctatgtcaaaaacacattgacgtgcgcccggatacaacttttcaacttcgtataccatgcagacgaaaccaacattgtgcatgtactcgcgttcatatgcattgaaccaacgagaaaggcgctgtattgactgaaacccaaaatataacccagccgcttgaaagtctatgttatctttttcaaggttgcgcatcaatcgattatcgtcatccggcgctggatgtcggtgatcatccatatcaatatagatatcaggattcatacagaattgatcaagccattcagcggtatccattgacacataacgattgacatatgggccgctttttgtttgccatttttctgtacaatcattccagaaagaacaagaaaattccacacgatatacgaacatgatataatcctcacaagtaaactcaaggtttacaagtacgataccacttatctaatttttctgcaagcatttcgttgataatttttgcaatttcgtaccgtccgtgagtagtacccagttccaggtaaatcacatcaagtgcgcacacaatcgcatcaatactttcttcaacgatattaccgccgcgttgaggctgaatgagacattcgctgatctcgccaacttccgctgataggtgatgaaccacatcactcttcgtgcgtttcttcactttatgagcgatttcaaaaaacttatcaagtacgatcgccgtttcttctcgcgttgcagtattctcggatgtcgtttccatcgcatttcgcaaaacagtttccaaagatgtaaaatagttttcaaacacgttgaaagggatcacatgaggaacaccattcaaaaacaccccttctttacaaacataatggatttggcgcggaatagacaaaccgccgctgcgttccaaatgccgtttaacgcttgctacaaaatcgaactctttcccgtatccagccaacatactgtgataagtgagttgaccaatttcaggaacatagagatcattttctttatacagattcatttacaatacctttatggtagccaaaaatataacaatcaattgaaggacgttcaccagggaagtgaatgcattgcatgatgcgttcagccattagatcttctcccatgtataccgaagtagtttcttcgttgtaatgggtatcatacgacgttttaagcgtcatgcccggaagccctgcaatgtgcatgaatttagaattggtgcaaggttttcctacttcaccgttaaccatcaacactgcattagttttacgtgcttttctcatttgaatttcaccccgatttgagatacgttccattcttttacgtcatcaacaatatcataatggttgatgtatggtaaagcaatttttaaattactcgcgtcttgaatgttgcgtaagaaacgagtaggagaaagaagacacaacctctcggatccgttgtttcctttagcggcaaatgatagggtttctcccccgtcaatcttcatatcaacagaaatcgttttgaattctggtgcgtatgacgtgattttgccgttgtctctcggtgtactatagaaacatacactttgtgggacattataacggtctgtttcaatgtacatgtaatcgccgtcagccattccccacacggtgtagagggatccggtatagtcaccaaaggaatttttaaaatcttccttcgtggtgtatcccagagagcgcaattgcataagctggttatgctgttcgattgcatcggctttttgttgttcctgtacttgcgcatcaatcgtttcttgccaggaattatacgcatagtaacccacaacagcgattacagccataacccctacagctttccagattttagagtcttcgtttttgttactcatgctatattccttttaagaaaaagggccgaagcccctttgttaacgaagataaaccacataaccgctttggtcaatcgcgcggtctgcgtcattgaagatattaccacgaatgccttttgctggtgctttccagcttgcaggtttcaggatattaccatcattatcgatgaaagcggcaacagaacgctgattgaacatttcaccagtttctttgttgcgagtatcctgaacaacgcgatgatatttgcggcctttctccagaaagaaaacagtttcgaaaggagaatcttggaaacgagcgttacgcgctttgtacattgcttccatgaaaggggctgctttttctgcgaggatttcgaaagtgttcatggtatatctcctaaagtgtgtttcgtttcgatgtaagtactatatcaaagatggttattctatgcaaggcttttttcgttatccatcaaatattttaagtgttcttttaatgcagggagttcgttcaaatggcgttgcttaactttctcgtactctttgcgttcccagttttcaagattgcttgccaacgcttcatcacaataagcgatcccgcgttctgcatcctgaactttctgtttccattgtgcaactgcttgttgataaagagaaccgttaaccatcataataatttcctcccttgtttcgatggggtaactataccaaagctaccccagaatgttttaacaaaaagtgctattagtaggtatccagtttatacattttgcaccagttcatgaattcttcgaaagtctgagtattaacacgtttttccttcttcactttcttagtgattacaggacggttagtaaaacgtttttgcattttcacagtgattgctactttatcgcccaggtcttctaccttttcaaccagcgcccactgagaaccgatttcagcaccgaaagtcaaaccaacaatctcacctgctttaacgtgtgctgcatattttactttaaccattttcgtattcctttctctgtttcgtttcgatgaatacaagataccaaaaagcctcccgcaatgcaagaggcttctttaacaaaaaatgctattttatttctttgagtaatttacggatcccgccgccctgtgtcttatcaaagattttctttgcatcaataacagaagtgattatgtggtagttgttaccttttccgtcaaactcaaactcgaccttgtagtcactacgaaatttcacaaaaacaaattcacctgcaaagtgcttacggaactgcttttcgttaatgtccaaccattcctgtgtatcatctaactgatacatgcgacaaaacaggatcgaacccattacagcaatcacgacaaggatagctaacgcgaattctgacatcatttacccctgtttactgattgacggtgcaatgatttaggcacaaccggatttcggtatggtttgactttatggatcgtgggttcttcctcaaccaaattaggaaattggttgttccattccatcgaaaacggataaggttgtgacttgaactcttcgatcacacagtttactaaacgaccaccaattacacccaaagccgccccaataatcgctatacgcataaatcaccccttaattgtgtcaagtacagtaaaccagtcatgaagccatatcgttgttcttaccgcgatatacgttaacaaactaatcaatgataccgctccgcaaatagccagcgtaatcaacagccggatttcaaatttagtaaaattcatatcaatctcctttcttagaacccaatataacaaaagccctcaaccgaagtcaagggctttgttttaaatttttaccagttttggtaatcgaagaactataccaggatggatcagacgtgcatccggaatagcatcacggttgattttggcgatatcaggccaatgttcaccaacaccatacagtttctttgctatagaatataggctatcacccggttgcacgacatagcgatccgattcaatcttaaccagatcctggttaatgatatcttcaaaggcttttgcttttgcttcgttaatcgtgttcccgtagtaatggcgatccataatagttaatgtgatcatcgtttctttcctatactgttttcgtctgtctcttctaaggatggaggttcttccagccccagggcataacgtttagcatagattagcatcaatgcatctttagcgcaatcatgaattgaatcatgctgaatgaatccatctaacatgcctttacgtagtggacacgtggtcacaccgcgagtcagtaaacggttttcaatagctgtacgcacatcacggctattccagaatacggtcggcatatcttcgaacgtgtcaagtttccctgtcatagttcgtacaacgtcggttagcatagaacgatcgaattcagggccgcgcgtataatcgtatgactgccaacgactcacaccgtcagccgctaaatcagcaaagaattgtcgatgaccttcgtacaaatccatgtcaatatcagaagggaacaaaaccctttgcgcttctttagattgctgtttccaccattcgatcgttttttcatctttgatgcgttctggttgtttccggatgtcgaatttatactttcttcctttagcaatcagttcctgaaaggtaggcggatcataaggatcatcaacaaaaggaacatagctaagttcagctagttttccttttggaaacgggccaatactttcataatcaaatacgaaatctacgggtaaatgactcattcgcgaccccgcttatatgattccatgaaataggccaatgatagagcaacttccggagtaacatcaacggatttgatcatgtctggagttaccgccatcatcccgaactgacgaagcccacaacgagcaatcgatttttccagtcggatcatgttttctacagcctctgcgaaattgcccagatgttcccaatcgtggtaatcttccattgtagaacgatcacttttcaaaatcagatcggcaaccaattcagcataaaggcgcggaaggtgaatattcatttaaaacccctcaagcatgtttttgttttcacgaatgttacgacccattttcaaggtatcaatgatcactgcatactcttcaaaagtgaattcgatatcttgtgaaatgtttccccatgtgtaggtcggcccgttaggacagtataacccaacttctttgtttgcgttgacaacgcagcgcaattttgcaaacagcaaattgatgtcgatagaattaaacccttcgagataatcaagcccctctctaccaatacggtcaacttctcgcaaaatcttttctacatctttgactttaacaataattttcataagaacctcaaagggccgaagcccttagacataatcaacagtgaatcgtgcgcgggtagttcctacataaagcaactgcttacacaattcataatcggcgtatgcgtatgcatcgcgcgtatacatgtatgaatgatcatacgtgcttccctgacctttgtgatacgtacaaaccggaagcgccttaactgtctggaacttgtttttgatttgccagaacgaataccagggggctttgtatccagtttcctgtttcatcttcttatactgaaacgcgacgtagttcaaataatcgcctaaacgttcctgcataaccggatccgcgataacctgaatatccgctttcgtatcctcgaacatcgattctgttttcatcaagaaataatcgatttgtaccggatcgcatcggtcagctttgatagtatcagaacgcggtatgatttcaaggattttaatttgctcgttgttgttatagataacttcaacaaacgaaaccccattcacacggccttctgtcactaacggttcttgcatcacaaccacttcaccaacaatgaacggctgatcagttttgtacaagtgtttgcggatcactgcgtttaacttgtctacgtttgcgttagtgtaagcaaacatacggttattattcaggtcatccggagtcttaacacggctaaaataacgtctcaggaagtcactagcgttttcgtgcttcattacccctagttcaccattcatgaggggcattaacggcttaccgtcgcgtatagcgcgtgatacctggatgattgggtttccttctgcctgacgcataatcttatccatgcgaatgacatcaaaaatttcctcatcaaagaacggtgaaagctcggtgatcccttctgtattaaccggacggatctgatccttatcacccaatcccaggatcaccgcacaactcggaatagtacgcttgatgatacggaatagttctttgtcaaccatcgatacttcttcaaccacaaacacacgacattcagacagatcagcggcttttttgcctttttgctgttcaaatactcgtaactcttcgttggttacggggctgattttcagtgctgagtgaatggtcgttgcatccatacccaccgcctcagagagaacgtttttagcctggtgtgtcggcgctgtcaaccagatcccactaatacccagttttttcaatgtttcaaacacaaattttaccagagtagttttaccaacacccggcccacctgtgatagtagtatggattttgtttctgatatttttaatcactcgatcatgtgcatttttctggtcttcgctcagatcgtcaaaagttaattcgctcatactttaatcaataccccttgaatacttgcgtgttcaataaaccaacgcatatctttctttttcttttcggttacggtttcaacttcttcctttcgaaagaatcggctaagaccactttgtttaactggattcatcttatcatgatattctttgataatcgaatttttatactcgttagcatcgtccggagatagaaacaacaaaggtgttaactctccttccttaatgaagggaattttaaacccgtctttatccttactaacgacgatataatattttgtaatcattctcgcccctcataacaaacgtagaatattccaacaaaccaaaacactgatagtataatcagtaaaagttttctttcaacgccatttacgtgaaacacacaccaaccgaaaagatatgtgatcatcgcgcaaacaccataagaaagaaccccaacagctactagcgcgatgatcggatccattagtagttgttagcccaacggcggaggttttcggcttgtttcagtgcatacagtttgtagatggtttccgcatccatacccagcgccaggaatttgcacataaagaaatgccactgatcgataagttcaaacagaacttctaaacgatcctcttcactcagatccgcaaatttagtattgcgcaattcctggtgatttgctttccacggtttccaaacaccggaagcaggtttaacaccgcgagacattccacccagagcggtatacaattcgcgggtttcatcggcgatcgcgtcgtcttgcagtttcagccaatcaaggatttctccgcaagtttccagattatccggacgcggaacccaatgcagggtatcagacaggctttgttgtgcatggttttgtaaatccagcatggattgtaaaggatcgccattacgggccagaaccttttgatattcggaatctacaaattccagatcttccgggttaaccaggtgcgcacatgaattaaatacaggagttttatcagtagtcatatcaatctcattttttcggtgatttgtcccacgacttaaatcgaagttttgccgtgagtccagaaacagtattatctttcaaatactgcataatttcaagtttagttgcgccgtccgtttttatcatttcgttgatatctttggaaggccacgggcatttatcccacattacaaccttttctccagcctcaatcaatttaaagaggcggtgagtagtatccggatgacgtgcttcattgtcaagaacccagacacgcatatttttatacggaacctcagaaagtgcaagctgtccaccagtgatagcgccagcattatcaacaaacaggctatctaatggcccctcaagaagataaaccgtttttagcggatctatcgtatcctgtccgtaaatcttggttgattcttcacaggctttgattgtgatatatttcgactttgccccgtcgcgtaaagcacgaccctggaaagattcaattttccctttcttatcgaagatagggatcactaatctcggttctggttttgcgatcggataggtatccggattcaccgtattaaccagttgttgccattcgcgagtaaaccacaaccgatcccacttgtcacgggggatacaacgattctgcacatattttatgatcggatgttcatccggcaaggtatctaacctttcgcagaattgaagagtaggaataaatttcttctcttcctttggtggttctgtatgtgttggctttaacgaattgcgatccttaaacgattccatgagataatcacggtaatcgtctggataatattctttcaggaatacgctaaacggtacaccataaccacagttaaaacaaccacaattcatatgatcaccctttttagaagggtagatccaaaatcgttttttgtacttgtctttcattgagtcgccgcaaataggacaacgcgcattgatgcttaatgcccccgatttacgaacgatttcgctttgaggcagtgatcccatgattcgggttgcaaattctatatcaagatacatttcttacctcagttgactatctttagatcctcgtcgattataccccgcgctgatcatttcgtcatgttctttttggcattcaatacaataacggcaacccttcacgatagccctacgtttttcgggtatcggatccccacaatcaaaacaatgcgttaatgattctccgtttctgatttgagaacgtgcaaaatctatcgcattgtctattgttgcctgaatggtatcttgaacaccgtcagcagggccaaatccaaccgccattgtaaatcctcctaatcaaatgatttcaatatcatagactaagaggatttttctgtcaagaacttacttgcttttctgttccgtcaagcattaacttccaaccacgaaatgcctgtttaaacgaataatttattgcaatatcaattttatcagaaccttttcgacgattctgataaacggtcgcgttgtcactcatatacatgatacaaattggaaaccatgtataatcgttagcagtagcccagatagtgatattcagcggaggaattatcatttctttttccttttccctgcacgggtaacgcccaatactttcggcccgatgttagttactgctccagtagtcacaccagaagcaatcttttctgtatcgccgccagaatcacccgcgaccatatcctctaacatgcgccccttatcataatattctttgaggcgtggaacgttcaacatgatttcttcatgctcttgttctgtcagattgtagcgattgcgtagggtatcatatgaactggttaagttcataaacccactcatatacggaacagcattcattctacgcttgatatggcgtactgaacgatgaaaaggagaatacgcttctaactcttcttttgttttggggttgcgaattacttcgccttgtccatcaaggatccccagcttgtaagcagtccattcagtccagggctttttgagtagccggatcatccggacgctatatgttaaatccatatttttaactaattgatcactcatgattattactctattgtgaaagtgaataaatcagatttggtttcaggttcaaactccatacaaacaacctcgcatagtggtttaacccctttccaatcctccaggtaatacccagtatctataccgcatccaggattcataacgaggccagtttcatcaagaaactttttgcatttacttgatgtggtgctgtcatcttgtcggaaacagtgtgttttcgaataccggaaatttgcagacatttgagggattatgaaagttccctgacgcgcgatctgtgatgcacgttcgattactttatactcaaattccgcccctgtatacttacccttaaaatcagaggttttgattttaccaaaaggcgggttactgatcgccatatcaaacacctgattaaattcagttgttaaggcgtctccatgcacccaggaggcttctggtacgatacgcttacctaactcatagtatgtgtgatttaactcaacacagacgatttcgcgcggcgtattgtacatcatgtaatgaaccatagcgaaagataacccaccgataccagcacacaggtcaataacacttccacctgtgcaagcatcgattgtgaaatcgcgagcaagtccaataggggtaaagaacgcccctaattcagaattgtttgtaaacgcgccttcatgaaagttttcaataatgaacaacttctcttcgtaagttagcgctttgtcagagtgaaccagatccattatctgattgtgtttcttggtttccgctttcgttaactttgccattgtcccagctatacaataatgttgatttatttggatagaattcccatccgtctacatatccggtttcccaatcagtagtttgttcaaaaccacagatccattcatatacacccggaggcatttcgacagaatcaggaagcccgatatcttccgcactgcgtccacattcaaagaatgcatcatgaatgaatggtcgagataataccgtaacataaccttcatcgtcaacagctacgatccagcgcgaactatgaggactatcgaacttcggttcttcttcgtccatatccgcttttatttcagccttacaaaaatcaatattcatttcaaaccctctttaacaccctctttcatagctttccaggtagaacccgcttcaccattcagggcggcgaatacaaatagtaagatagcaaggacaagattcacgccagcaatcaccatgattttgctatacacgaaaatgtaaggcattgccaccacccaccaactaaaagaattaccagttacgatgttgagtgctgcaagtaagaaagtgataacgaatgcgattttcataatgtcctcctttgttatgattaaggtatcatcttttttgaaagaatgcaatacctatagatacaaaaaagcccagaaaggggcttaattttttatgcgttattgatgagataccgaagaacgttttttgcttgttcctcattacaaccaactttgaaaccaggttcgatagggaggaagttccagaggaaatcaacacttccttcaacgtcatctttgcctttttccagcatcgctaacagtaaacctttgtttttgatgctgtttacgattgcgtcaaaataaccatcgctgaaatcaacattcgggttcagcatttcgttgtaagggttgttgaatacgttcattttgaatctcctttgtttaactcagtatcttgtctacgtgagttatattaccacaatggagattcaggtcaatacctttttacggttttttgaaaagtttttcgtatttggcttttacccagcgatacatatcttcggccttgtcactggcaatcagtgagaacagcagatagatcgcaacacccaccaacacaacgcctactacaatgtagacgggtaatagaactgggaagagaacccagaaccatgacatatgcgagaagccaaatactttagccgctgcaaaaatcagtgtcagtccagtcagaagtttgatagccggaatcggaatcgttatagtcttagtcatttcattaccttacattctttatggggctattcgccccagtcaattaaaattgaatgtcagattttgcaatctgcgccattttatcacgtcgggtggattcagcctgtttaatcatcgggccttgtgtctgttctactgttttaggcatagtgttgccgtggtagtcagatttaaacccgtattcgctgttgtcggtatccatccagcgctgattacccttgcgaacttccaacttgaacttgttgaaagtgttcttatcgccataacgggatttgatttgcttgaacagttgcataccctgatcagctaactcttccgtctcaatcacagctaacataaaatcagccgtagcaggtaaaccagcggattccgcaacatcacccatactcacatccgaactatcccatgcagaacgcccaacctgtgcgcctgtccacattacggtattagtttcaacagcaaggccgcgtagttcttcggcaattgctttaaccagaatataggtattctcagcacctttaacacgggttgaagtacagatccccaggtaatcgacaatgatcacatccggaacaaactgtttcttcaatttaagctctttcacaagcgctctaaagtggtttgcacctgcacccgatgtagggtactgcttgaccaccaaacgcccaaccttacctgctttaaggcgctccattttgttcttatagtctgcgtatgtaatgttcccttcgtcgatgtcatccatagtcacatcaagaaggttagcatcgatacgcttagagcaaacatgctctgccatttccatagaaatgtaaagaacgtttttaccctgttgcagataatcagccgcaagagaacataaacccagtgatttaccaacgttaacaccagccatgatgatattcagtgtaccacgttccgcgccgcctttggtgattgcgttcaggatcgggataccaaacggaattttcatcgcttttgattggtaaagcatccaccgtttttcataatcttcgaaatagtcatgacctactgaactatcgaatgaaattgctaatgcttcctccatgatttcagggatagccccaacaccaggaagtttcttgttctgttctgccagtggtttttctgcgttcgcctggatttcgattgcacgagaaagagcacgatacattgctttatctttgcaatatgtttccgtttccttcattagccaatctaaatcttctggcgcatttttcagcgactgaatcgcctttttcgtgtcttcgtagactacatcacttagatttcgtttgtcaagcgcaacctctaaagcagtttttgacggaatgccgttgaattcctgtacatgtttatcaatgaggtcaaacaaaacttgcgcattgccttcgaaatattcctttttcagatgaggccatgcttggacaaaatatgtcccgttataaatcaggttagaaaatattgtatcaacgatcattgtattgccttataccaggttgctgaacatcatgaaaaagttgtaaaccttttgtttgaatacatcccataatgtcagtttaggctttgggacaactgaacccttttcaagctctttaatctgtgcataaattgcatcatgcaccagtgggatcaatgcttctttgtcttcgtctggggtactgaattctactttcagaccatgatcccaaaacaccttatgaatataaaccagatgcgcaacacctttttcatcgttaatcagaagttcctgaataacatctttcatcgcttcatcaatataattctttgctttgctctcgatatccatacattgcctcggttatggggccgaagccccatagtttttataaaatttcgttgtcttcttcgatatcatcaaatgattctgggatatcgtcatcatccagatcaggatctgggatgctatcagtgctgtataaatcttccagcgcggaaccatcactgatttcacgatcagggatcttatacttttcttcgatagctttcaagaatggttgatgagtaaacagaggacgccagaattcaacgctatttgtttctgactcacgccatttcttttcttcaacttcgagttcgccagtctcggtattcaggaaagcacggttgcgccagcctttagttacggtctgtacaaagttcatttccattgccagatccaaaaggccagaatacatactaataccgccttcataggtaacatgcagcgggaattttgatttctctttcacgaatcgagatttttcgatgttcatgatgaaatcataacccactacctcagtaccttctttcacctgttgtttacccaggatgatcgcagtatcagcggaatacattaaaccagtaccaccggaaataactttcttgctgtacatttcttgtgtgtcataggtatgacagatacaaaccatcgggatatccaggtcagccagataaggcgtaaccatacggaacataccttttaatgcttttgctcgcgtcatatcctgtttatcgttatcagaaagcgcgtcagcaagttcttttttacttgcagtgttgcctactgagtcaacgaatacaatcaccttatcaccgcgttcaagcgcgttaagctggcttacaacgtcattacgcaactgctcgaccgtcgtgatacgagtatacacaacacgatccggatcaacacccattgatttcagataggatttagtaacacctttttctgaatcgtagaacaggcacacagcatcttcatacgttttgagataagccgctacagtcagcaaacctaagttggatttgaagtgtttggacgggccagcgaaaagggtaagaccagaagttaggccaccgttaaacgcaccggacaacgccagattcagaatcggcacacgggttcgcgtgatggtaatattgttgaatacgtcgctttcagaaagtacagatgcagtttggctattcgagtttttgatcagtttttttagtagtgctttgtttgacatttaatttttccgatttattcattctcattctatatatctcactagttaatgaaaggggccgaagcccctagagtttaccagtcaccgaacagatcgtttaaactggcacgtttttcataatcaattttacatacttccgtgatattagtcaatggactaataacatgtttttcaaacatacccggataatctacccatgccagaatatcactttcgatctctgacggtagtttatttccggattgccacgcgatgcaatcggcttgccacgggtttttatcccttagtggtagaaccattaccttttcaccttccatgattggtgtaacaccatcaataccagcagtgaaacggttaaagaacagcacccctttaatatggtttggtgttcccttgattggatagccagccccatcacgatatttcgaaatgttgttagcagatgatacaccagcaatttccctgtagtcaagttccttatattcttcttcgaactttttataatgttcgtgtaaagataattcaccttcttgcaggatacggcggatcgcttctttcaggaatactttcacagaggtcggagtactcgatcgctgtgtttccatacccatgattttcagtttcggtttttcatagcgggttccttcggagtcccacacgttagccgcatatcgttttttagcagtccagaaacttcccaacccttcggaacccaacggaggcccagaaatgatttcacgatccataaacatcaggtgttccacgttgttcatgtattcgcaaagttcacgataccctttatcgatcatcggttccattctttctttagcaaagcgatccaggaagtcaacccaatggttattatccttaaatttagcctcaccaccaacttttgcaatcacgttatccatgcaaacataaatggagtcagtgtcacagtaccgaacatatgcatgatccgtagtaccgcacaggtcgttaaggtattcgtttaccttacgttcaatccactggatagccaactgcccgaacatggtgatcgcgctggcgtttcgtagatcgaagtatcggaagtgttcgttacccaacgcaccataaagggagttgatagaaatcttacggttaagctgtgctgtgttcgcttgtgcgatcttcttctcacacacgcgcttaactgctttaagcatttgttttgtaagagttttcagaactgctttcgattcatcactgaaatctgtatagaaatcaaagtcaggatcaaccatttggttatgtgcgtctgttaagtgttcgagttcgtgcttgatgagttcaagatttcgctcacccgccatcattcgttttttccacatcttacgctgatcaaatactttcttgatctctacggggatcacgcctttgatatcacggcggaacatccacccgttaggagaacagctaaattcatcgctagggcgcggcgcggtcttattaatatactcttcaagagcacgtaccgcaaaacttcccataatcgtttcagggcttatattcacctgtcggatgatggaagggtacaggcttgttaagtcaaacgataccatgtatttgtaaggcccaggaactggatccttcacaaatgccccagggtaaggggttttagtatggcgtctgttttccggaataacaaccttatcttcacgcagagagttataaatgatcgcgtcccacgttttcagcggagacataacccctgggaagttaatttttgcatagtacgctacagacagaaccagttcaataaagtttcgtttaccgtcaatatcaagtacgcggataacgtcaacaatgttgtacgtgatgtacagttggtgatctcgctggcgtagttcagacagtgaaccttcatactcaactttatttttaccagtttcgtattccgcgatcgcgtccagacggtaagatggttgtggggtaaaactgaatttcttatacagcgccataccatccatttgagcaacgccggaaatgtcatatcctaattgttcgttgccgtaagcgtcggtagtggttctggcggttactttaccaaatgggctaaaatgccttaccacgttttgaccgaaaatgttcaggtatcgcgtgatgatatatgcaatatcgaatttgtcagagttccatccggttacaataacaggggttcgctctttccaatctttgatatacgcagacaataacgacttctcggtctggaaagaccgataaacaattttgtttaaatcttcttcgctaatgtcttttcgatcaacgtttgccgcgcaccattccgcaatgccaccctcaaccagatcgtatacatagaatttatcttcaatgctatcgtaatgggtaatcgcatcgattggatattttgcttcacgcggatccggaaattctggggcggtcacctcgatatcgatagaagcaatgcgaatgtgttcgcggttgtattcgatttcattccggtacatgtcagaaatgtaagccagtcgataatcgtccatacctagcgcttccatcccaacatcgcgcatacgctgcatccagtttttagcttctttgatgctgtcaaactgttttttgaggcaaggcttgccataaatgtctttgtatggggtttctacgccattcatagcgtgttgatacattacgggcgcatatttcgtcttacgtacctgttcggtgccgttagagtcaacgaagcgctcataaatggtatctcccatttgttcaactgataggtaaaattcattcattggatcttgtcttctccattaatataatgttccattgtaacaccacctacagcaaattcaagtttactcgatgttctaaaaccaacaaaccttctgctaacaagtcacggatctttctcagttgaacaagctggcgttcaagtttaaacccgtcgaataacatgctgaaaatactggaattgacactatgatattttgcttctgcaattccctggttaaccatcatgatagctttgttaaccattagtttcctttccgttactgtatgttcatccagttgacaggttgcaagggaaaccaaatcatcataagcacgttggtcaataacgttatccatacgggccgcgaaaatcttattcatgtaagtgcggatcattgcgcgtcctccattcttttcataaagacttcttttgcttgttggatcaagcccagagattttttaatacgctcatagaaatgagtggtttcaacttgattgcataacaacgtgtactctgaaatgttacgatcgtaaaatccaggaaagtagtgttgtgcatagctgtaagtgcgggtatctgacagattgcaagttaacgataacaagatgtcatcttttacaatcgggatgatcaaagtttcgttggatttgattgaatccatgatttcgttaatagtcataatatatccctctcaatggtgtacacccaatataacaaagcccttgcattcgtgcaagggctttttgattagtgaccgatccggtacttgtacttgaggatccaatctgctttttgcgagtgagtcagtacgcggaagttgttttcttctgcaaacttcaacccaggggttacaatcttaaccatgccccactcttcgagaagtcgcgcaatgttgttccggcgtagttcgtcttcttccgtcatatcgacttgacgaccatcgagtttcaacagttctttaaaatgcacgataaaatacttaccttgctttttcagaatgtggcacgattgccagagcattttctttttgttgtttgcaataccaatacgggttagcgtttcacggatctttaaaaaagaatcgtcgctgattagttgaatttctaacatacatcaccattgtttaatcaatttttccaatttcttttgttcagctttgtttttcacaatacccaacaaagacagagcgacctttgcgtgttttcttttccaatcctcgaacattccgaggtctttaagttcctgcaaatattccatcgctgtacgtgtatttacactgtatttttcgcgaaggatttcgataataattttctcttcaaaatcttccgatagtttagcccatgcaccgaagcgtttagccttcctaacagagttgagataatagttatagtgcatttggtcagagatactaccgcctaccagattcatcacataagcgttatatatcgtgtctatgtgctggctcattgcgttgtctacaaagtacttatcatacacatcatcgataaccaacggagttttaccgttgttgatttcgtctatgatgttaaacaaggtgttttctttatccttgccgtactctttgaccagttcttcaaccttatcccaatctttagaaagccaagcggattcatgcggggataactcttcttcatccagaaattccgccaggctcatgattacgcctcccagaccatagaaagcatcaggttcatcaacagatattgcagatgaatttctttattcatcgccagcccgtattgcgcgttgttttcgcctacaatctggatcagtgcgattttagaatcctgattcacgatagggtaaatcgtatcagtcaattttccgataaaggtatcgtattctgacgcatatttaataacctcagagcgcaaccctttatagttcttttctttcaacagggtaatgatatgagacacatcagaaccaacgatctcatttaggatccccgcatcaatttcaccacgtttcgagtagaacccgatcgctttgataatagaacgcgcatccggataatgctctttaacaaacgctgcaatgactttagggtcatacttgatattctcgatttcaaggataccgaaacaacgcttgattaactgtttcatcagttcgatacgttcagcatcagacggaacaccgaatttaacaggagggcaacgagaaagcagagcactatgcacaccgttaatgttgttcgccgttacaataacagaaacgtttttactgtatgcttcgataaagctacgtaagtgtttctgtgcttccgccataccagaacgatcgaattcatcaatgatgataatctttccgcctggtttctgcgtcattgatgaagcaaaacgatccagttcattacgaatgaagtttacaccacagttcgaaccgttgacaaagaacacctcagcatcaacctcacgggccaacacaagcgcgagggtcgttttaccagtgccaggggaatcagatacaagggtcatgttctcaacacgcccagatttgattatgccccgcatagcggctttgtcaccagaaggtaaaatacactcttcaatcgttgttgggcgatagcgctgatcccatgcaaattcatcaggagatcgggagattttaccgtatttggtttcgatgatttcaatattttcactaagttccataatataccttcaaaataaatggtgtaaaagaaaggggccgtagccccttaaaactatcttacttgaatgtgctacttgcttcaagtacgacgacgtaagcaacgccgttatcagaagagaattttgcggcccctttggaggaaatctctactttgtaatcgctgttgatgaactgcatgttatcaatcttcatatcgaaattgaaaacattgtcgccttcatactcaccgacttcaacggagaaagttgattgactttctttgcttttcgcggtgatgaccagtttaccatcaatcggttcaacggacaggtcggtcagtttcatcatgcgagacgctttgatcagtttttcgaaatcgttagcggtaatctggaaaatcagatctgctactggcatcaccaaacgttttttcggtttcgggatcgttgttgcgtctgctgaacgttcgatgatcttcatcttgtcgccgcgaatcacgatttcaccagtggaaatatcatgagtgatttccgcgtcagtgccgacgatgttcagcatgttcaggaatgagttgagatcgtagataccaacatcttcatcaatcacatcagcaatttcagcttctgcgtatacaacgctgttgattgatttcgtcatgatgaatgaacctttggtcagcatgatcgaagagttgatttgagaaaagtttttcaggatatcaatagtttgtttagagaatttcatattcagcctttagttttcaataagtgttacttaataagtgattttacaacggtttccgctgctgtgtcaagcatatcagccatttctttaacggttgtacgcttaggatcttcgcggcgttcgctggtaagtttacgatgttccgcaaccactttttcatcaatgtcacgataatgtttaaaacgttcctcttgaggcatagctttaaacagttcttttgtttcgtccgagagtttagcaacccaggatttacggacgcggttcatgtagtcaacaaaaacattactttcattcatatatttcttctctaacttagaattctttgagtgggggccgaagcccccgcttgtattacatgtctaacagtttatccaggtcgtcatcaccggagctaacagaatcatccaggtcgaacggtacgccgtcatcttcgcctaccggaaccgatgatacaccaccagatgatttcacatcagatgtctgattgtcaaacttagccatttcattatcgaagttgctcagttcgctatcaaggtcagcggaagcgctggaaccagcagaaccgatcgaactacccataactttattgaagcgagtggtcaggtcagccagcggtttgaattcgctttcggcagtaatcgggcggagatcgctcataccttcgaaaattgctttctgaacttcttcatcgtcgatgtttttgatcttagccggaacaccaaacgaactatcgtcatagttaggccaatcaccaacttttttcgctttcagggtgaagttagcaccatcaaacggacaggttacagcaatacccggttcatcaagttctggattaccgttaattgcggcggtgatcttgtccatgattttcttaccgaagcggtatttgaacaccttaccttcgttttccggagcgcctgggtctttgacgatcaggacgttagcccagaaactttgtttacgaccgatctggctcagtagcttatcttctggcccgtttttgttggctttagccttctcatacagatcgttttcggaaatgtacttacatgcaggacagccgtcataatcgccgtgggtagaggaacagttctcaatgtaccactggttgtttttcttgaaagagtggctcacgatacggacgaacgccagttcatcatcggaacgtgctgggaggaatcgaataacggcggaaccgtttttctgtgcgtccagggtcagtttccattctttctcatctttctggaagccggaaccacctttcagatttgctacctgtgcctggagtttagcgggatcttgacgtttaaaaatgctgctcatattctgttttctcgtttagtttagtttgattaacgtttgtttcattaagtttcgatattttatgatatctttttcagtaaggtcaaatatttttctgtatgcctttaacttaatgctaaagtcagaccaaataatatcatcagctacttgatcgtgtttatttatgatacctaaaaatgagtcaaaaatcaaaaacgattcgtaagatatcacatttgacaggacaagtttgcttatgtaggacgttgatgatttttcgctgtacttgaacaccagagacacggggatctctttcattttggcgaattcgtacacgtttttaacgtcatccacaaacacgttatctagtctttgtaactttcctatgtactgcctgtaaaagacaatactatcttcatcaacatcgcctacccagaaatccggattggctacgaagttggagaggaatataaaatagatttctttgaatgtaaagcgttgagctaattttacaaagaaatatctatcctttcgcttgttaaaggcgttttcactaactttgatctgccagttgtattgaaggacatcaaaacgcccctggaaatgagttttcatcgccagatataacttgtatacagacaaaggcacaagccgtgaattcgcctcactatcagcaaacggagctttaaatctcacatgaagccgtccagagtggttgatgaactatgttcaagcgcaaccgatgggcgaagcatgtttcctttgatcgcttcgtcgctaatcttatcaaggatcgcgcgaggaaccgttttattcagcatcgcataatcaatggaattttcatccatccattgtagcgttgcttccatgtatgttgccccctcagaggcaaccagattttcgatatacaaaccgacttcggtcttatttccgatcatgctttacgccttatcgatcatatcatacagttcgatcagttcgttgttttcttcttcgaaagcggtacgggcctgttcgtgatacagtttgaacagtttcccgaaggtttttccgtcgataccgaaatcagtttttgctttggatttaatatccttgaaagtaccgttgaagatctcaacttgagttttcacgttggatgcttctttgatcagttcttttacctgttttgctacatcagggtttgtttgtaaaaattctacactcattttgttacctcaaaaatcactcagtttttcgaacatacgggaaagtttgttatccatgaagtaacgttccattttggctttacttccggattttggagtattatacgcttcaataatcgaattttcaatatcttttggtataaattcgaaatcgcgtagttcctcattttctttgtaacgagcggcccattcaggggtcatcaacgttgtcgggtcgtctgcctccagccatgcctctaactcagaggattttaccgctggggcgcgttcgccttcaaccttcgtcacaatataatcatttctaattttaatacaagcgatactatcttttttatcgcctttgatatttttgtatcgcagatcgttacgtggcgaaccatacttaggcgttacccattttttctggggaggcgaccattgacgaacaccgttatatttctgtagttgtgtaaagtcgctatcagcggaaaccactaatactcgtctaccttcaccaacagcttttttcgtaacaacagcaattatatcatcagcttccgcgaattcaacctttaatccaagataaggcatattctgacggatttcttcgaacactgggttcaggaagttgttcagacgatcccaatcccattctgattcttcatgttcgatctgacgacgttttttgtagtaccaggctttttgcctacgccagtaatttctgtcatcgaaggcaatcacgatttctggatactcacctttaaattttacaacgttaaaccgtaaagtgtcaagcaccagatgacgaatcatttcgatcgtgatggatgcttgttcctttggtttgaagttgttcatcagtgtagcgatggaaatgttagagatatcgatgaccatagtatcatcgggttccccttcatcttgcatcagcttgttcaagttaaacatgcttgcaaaactgctcatacatacctcaatttttcaaagaacggggttattgtagtaacttacgaaatgaagtcaatacaaaagaccataaaaattttgatcaataatacttgatctgatcaaatttatgatctataatttattaattaataattattttactacaatgatcattgtaggtcaagtactaaaatcaataaattttatataatttagatctgatctatagatcattagatctactttaaccttaaataatatagaatgaaatttgattttgtctacagttattatataatattcttaacttcaaagaggaaatatgaatactatgactaaagaaacaaccaatatctacgcagacaatgaaaaactataccctatcctctgtgcatggaaaaagcaaatcgccgaaacaggtgatcgcaaaatgcctaatgagttgggggctgctattatggatattgcaaacgggctatcacgtcgttacaacttcaaccgttattccgaagattggaaaatggatatgatcgatgacggaatttccgctgcaatctcaggactgcataacttcgatgaaactcgttataccaacgtttacggttacattaacaaagcatgttggcaagcattcgtaacacgtattctgtacgagaaaaaagagaacgcgaagaaatataaattcttccttgagcacgtttacgactgcgaagattcagatatggttagtattgcagacgaaggtttcattcaagatctacatgacaaactatctcagtacgaggcttccgccaccaaaaccaaagacaaggaagcggaagtattcccaacattggaagattttctatgaaagcaataattgacttaaacaaaatattaactgatatcgattacgaaattgacttgctaccctacttcgtaaaattagagttgcaaaacgtgggaatcccggttatcatcgatccaactgacgtaagaaaccccgatttcgaagtagaagaaggggttttgtcttatatgataaacgccgaaactatgatcatggagatcacttatgattgatgaagagaaagaagtactaaccagtgtggaagaagtggatccagaagaggaaattcgacaaaagatccaggcacgtgtagaagccgacgcattgaagcgagcacaaaaattcattaagaagaaccggactgagatcaaacgcctccgtagacacgcagaggaagccctattcaggggtaataaggttcagtatgtgtatgcggttaagaaacttcgtgatatgctcaaacagccgtatacagaggatttcattgatacgatgtggaacacttcactagcatcaattcgaaatatcgtagcttcacaacagaagcaataacaaacaagtagccccgaaaggggctatgagggtcttatgagaaagtacttaatgatcggggatactcacgctggcttgcgtcaggacaacccctggaatgaagaaaacctatacaatgtattcgtacaaatcgtagaacactgcaaagcaaacggcattaccgaggctttccatgctggtgatttctttgatgtgcgcaaggccaccacacaaaccacgatgaaattcattcgtgaacgtattgtgccactactggaagaagccggattacatatctatgttctggttgggaaccacgattgccagtttaaagacaagatccgccctaactcaccgcgagagattcttgatcagtatgattgcttcacggttgttgatgaaccgatgacagtaaatcttgatacttctccgctgcaatcaatcgatttgatcccgtggatttgtcaagaaaacacacagcagatttttgatttcatcaaaaagtcaaaatctcaatactgcttaggacactttgaactgtccggatactatttctataagaacagtaaagcggatcatgggcttgaacctgatttcttaaagaaatatgatatcgtgtattcaggccactatcatcacgctaacgaaggcgctaacgttttctatatcggtacacctcttaccatgagcgcgaacgatgaggacgaaaccaggggcttctatgagctatcttatggcgacggtaaacgtgaattaactttcattgctaacccagtatgccaccatcgccggatcacctatccggatcaaaaagatgttgatgttgcagattacaaaaattgctctgttcgcttgattgtacgcgaagttgataacgatttgcctaagtttcaaacaaaactggaagaaacagtttatgagttgaacattgtcgatcgcgtgatcactgattcagaagtcgatactgattttgaaatcaaaagtgtatctggattgattagtgagtacatcaacaacatgcagatcactccagaagaaaagaccgaagtatctgcaataatgagtgcattgtatgcagaggttacgagcaatggaaatagttgattacgttaatattttaaacgaagaagggcgatataaagccctttataaaatgtttggatttgatgtgattgttgcagtacagcaggattcctataacgagtatgtgtcattggggttcactctgattaaagacaactatcacgaaacaaaggtttggacatttactgtcctgaatagcatggatgaagattccgtgatatactgctttgatagcacgattacaaacatgattagtgatatatcccaaaggataattgatgaaactcaaatttaaaacattgacttatcaaaatatcttgtcggtcggtaacgtaccgatcgtcattgattttgattcagcaaagaaaaccctcattacgggtaaaaacggcggtggtaaatccaccatgatcgaagcgcttacatatgctctctttggtaagtcatttcgcgatctgaaagtcgggcaactggtgaacagtatcaacaagaaaaaatgtctggttgaactgttgatcgaatacggcaatgatgaatataaaatcatccgtggacaaaagccgaaagtatttgagatctggaagaatggcgaaaaactgccggaagattcagccgctggtgattatcagtcacagcttgaatcaatgttgaatattaacctggtgggctttaaacaggttatcgttctgggtactgctggttatgtacctttcatggaactgaaaacaccagatcgccgtaaattggttgaagatttgctttctctgtctattatcagtgaaatggacaaactaaacaaatcatacatccgtggtgttaaccgtgaactggatacgctttcaatgcagattggacacgtacaacagcagatcgcaacacatcaaaagttcattgacgaacaacgggcaaaagcaaatcagaatacggcgcgttaccaggatatctacgattcccacgtagaaacagcaaaacaaatcaaagcacaattggtcgaactacaaacccagatcgcagaatgtgtgatcaatggtgaagaccaaacagcaaatattcaaaaactgcgtgatggctatacacgcctctcaatgaacgtagaacagttgcaacgtcttgaggtgatgtatcgcaagggtggcgaatgtccggcctgtaaacagccaattagccccactcctgaacgcatggaagaaattgccgagaacattaaaaatggtactcagaaacttacgctgattaagaacaagcaagatcagctacagaaaatcatggatgatttactaacacaacaacgtacactaaatgggctgaaatccaaatacgaatcactacgcggtacacttcaaaatgaagttgcagcggctaaacgtgttcgggctatcatggataaagcacaggaagacgtggtgatcgacgaatccccagttgaaaaactccgtgaagatgaaaaggaacttgattctaaacgttctggatttgtcaaggaaaaatatttcagaggtattgttacggatctgctgaaagattccggcgttaaagcgagcatcgttaaacgttatattccttacttcaataaacagattgcgtactatctggatctgttgggtgctgattatcagttcactctggatgacgaatttaacgaatcgattaaatcgctgggtcgtaatgattttagttacgcatcgttcagtcaaggcgaaagagcacgtatcaaccttgcgttgcttatgacgtggcgtgatgtaaccagtaaaatttctggtgttgatttatctctcctgattcttgatgaaatttttgatggtgcaatggatcgtgaaggtgggtttgctgtgagaaaattacttgatgatattgaaggtaatgttatagttatcagtcatcaagaactggatccgcaagatttcaacaggcatattactatggctaaagttggtcgatttactaaatgtacgattgtaaacaatgattactaaaaaatgggacgacgaatttcaagccgagattcgtcgtcggttttaccatgtaggcgggattttgtatcataaaacagagagtagaccaacggtgtctgttcctgctggttactattttaaacccggtgatgtggtaaaattcaacaaaacgagaaaaaagaatccgtacttacagatttgtatgaggtatgaagggaaatctaactatctgtacgtgcatagagttgtctggtttttagaatacgggtatcaagttgattttattgaccatattgatatgaatccattcaataatgatccttctaacctacgagaagccacgacgcaacaaaatcactacaataaaaaaggaaaatctaacacatcctcaatatataaaggtgtatcatgggataagccaacttgtaaatggaaagttggtatacaatacaataggaaaaagatccatttaggatattttgacgatgaaatagaagctgcaaaggcatatgatgctaaagctatagaaatcagcggaaaatacgcgaggttgaacttttcatgaatatgttagaaaaatcttttgaattagaaaccgctctatttccagagcggttttatctccacaacaattttcttgaagaaaaacatatagttactatgaaagatgttgaggaagcattcaaagataaccctatagagttgacgcgaatcaagaacaacaaaagttctgtttggttcctcgaaaaaatctattgaccgaaatccataaatacagtaaagtagcccatgtaacgaaacgtgggctttgtttttatttgaggaacaataaatgatcactgaatccaaaatgacttatcaggaagcactgaaagttttgggcgcaactggtagcgaaaccagcgccgaaatgtccagactcttcaaacgcgcatccttacgcaatcaccccgaccgtggtggtagcaatgaattaatgcagaaaattaaccaggcttacgacgtcgttacaaaaactgggcctagtggcgcacgttctgagactgctggtgatgttcgcgcacgttatgcacgtcaaaagaaagaatgggaagaaaaagttgatgcttactttgtagtggcgaaaaactatttcagcaccaaatttaacgcacaggaatttgcggaatacttcaccaaatacactggattgcctaccactttcaaacaggaagtaacaaaaggtagtcacggtgtttatgcttcgttccgtttcacttctggtgatgcttactttgatttcggtttcaactgcacccctccgaatggacaagggttagccgctccggattcatctgcactgggtaacgtttctgttagtacctttgtactggttggaactaaaaaacataaaatggcaagccgtgattatcaatggggcaaaaacccagataagatcactccggaaagcctgttcccgtctaaaaaactggaaagcattttcagccctgtacagaaaaatatcaaatacaaacgtgctgattaccttgcatcattccgtaagctgttaggcgctgacattagcggaaacgatatctttgttgaagttggtacactgaaagttcgtttctatcgtcatgtaatgatgcgtaaaggtgcgtatgtgtttagcgcggtgtatgatcctgctgtatctaagtatcgtccggctgcacaacttcgcggaactatgttagaagacgaggacggcgcttgcctggatatgatcgttgatacgttcaaagagttgcagaaactgaaaccgagtgttcaaggcgttgtgaacgcgatcgataagatgaacgcagagtttgcagcgggacatcgttcagcatcttttgttaaacgtgtagctgctcaggaagccgcgccgaagccagaagagaagccaaaacgcactgttaatcgtatcggtaaagaggaatacttcgcagcactaaaagatattggtgctcgtgtaatgcctaccagcggttatgttgaatttgataacggcgctggtgttactatcaacttcaagcgtattgttgtaaaccgtaaagcatactactcattcagtagctttgatttcatgtactctggtcagaaacacattgagtggttgaaaggaatcgatatcgcagaagataccaaaggcgcaagcattagcctactcactgatactctgaaatctttacgtgggatctctgactggaacactgttaagagcgctttagatcaaatgaattctaacttcaaggcgggtaaattctccgcacctcatgtgaagaaggaagcagagcaaaaagcacctaaacagaaagacgaaatcggcgcacagcctaccaaaccacaggcggctaagaaagatacaccggaagtggaaaaatcacaggctgttcatgcagcacgtgagaaagcgaatatgaacaacactattcgtaaaatgatgactatgttagtcaaagcacagcgcaaagacactccggaagatatcaagaaggaagttgatgcagcaattcaattgtggcgcttgacttactaatcaaatgaactataatgggaactgttaacgcagttccctttttatttgaggaaaatattatgagttgtccaacatggttacgtttggaaaatctgaaagaaggtacacaaaaacggatttatattaatcttggttgggttcctcctaccgattttcaaatggctgagattttaatcaatgctgttaaagaagtaagcgacacttacgaatgggaaaggctctattttcctttgattggtttgtatatgacgcgaaataaatttgaagaaatgaaacttgctgttattcgcgctacgattattaattcccaacaaagatttactttgaaaaatgcatggagttctgaatgattattcaagtatctgtacagggtgacactctgactgtcaccgaatccatcaataccgctcttgctgtatgtcgtgaccatatctcacaaaatcctccagtgactgagatcctggaaattgatgtttgggatcagattgggatgatcgacgcatcatatggatttaccccgcgagatgaagaactatctcgtatcgaatcatggctgaatgaacaggaaacggaatgaaactccctaagaacacaacactactaacccgcgaaaaacttcactctgttgattggtgtcctctggatatcatgatttttgatattgaatctcgcgtgatcaatgcaaaatatcaggggtgtagtattttctctgttgaattcgagaagattcgcgggtatgatgagaagtacaaagaaaaactgaaagttatgattgaagcattgggctatattgtaactgttgaagacaataaaatgtggatcgcaatatgagcatagtaaaagcggtgtttgcgctggggcatgatatctaccacgatgatttcgcttttggatatcagcaaggcttgccgtggggccactgtaaagaagatttacagaacttcaaagaagaaaccgccgatagcgttctgattatgggtgcaaatacgtttacctctcttccgggtaaattgcctggtagaattcattgcgttctgtctggttccggtagttttttgaaaaccaaaaaaggcgaggttgctgattacgtgatccacggtggcgggttgtctgctgctattggtacaatgaaagcaacacacccagataaaaatgtgtgtgtcattggtggtaaggggttgcttttagattcaatcaataataaaatggttgatgaagtagttttgacacacatttacggacatcatgtatataatacccctgcatttaaacgcgatgtttcgtttactgcttctgaattgggtgatgcattgttaaaatatgaattttctgatttcgaaactcagtacatcaaagaacatgaacgcattgaaaaaatcatagtcgatcgatataaaaaggtataaaatgaaacaatatctggatattattaaacttgtacttgataacggtgttgaatcaactgatcgcactggtgtaggtactattcgtattttcggcgcacaagcccgatgggatctaaacagaggtttccccgcaactacctgtaaaaaactattcttcaaaccgtgcaagcatgaattgcaatggttcctgtccggttcaaccaacgttgaagaacttcgccggatgacctggggtgaaaatagcgataagcgcacaatctgggatgataactatgaaaaacaagctattgatttaggatacgattctggttatcttgggccaatctacggtcatcaatggcgttcgtttggttctctttatggggatgatgatagttattatggcggtagtggtgttgaccagatcgcaaaagtcatcgaacaactgaaatcaactccagacgatcgcgggatcatcgtttctgcctggaaccctgttgatcttgatgatatggcattgcgtccgtgtcactgtttcttccagtttgttgtaatcaacggtaaactgtctctacagtggtatcagcgttcagttgatgtcttcttagggttgccgttcaatatcgcctcctatgctctcctgacgcatattatcgctgatatttgcgggtacgaagtgggcgatctggtttggactggtggtgatgtccatatctataaaaatgcggttgaacaggcaaaagaacttttacagcctaaccgttcaccaatgccattaccgattctaaaaatgccgaaggtaagtagcttacttgatttagatcaagaattctttgactcgataaccttagaagggtatcataatcacggctctctaaaagctgaaatggcagtatgaaaaatggggcttcggcccctttcttaacaaggtaagagaatgaatgacattaaagtagtagtaaaatcctctggtgtacgccagccgtttgacaaagaaaaaatatacaaagtgctcaagtgggcctgtgatggtcataatatcgatgttcgtgcattccttgaaaatgtattagaactgatccgcgatggtatgactaccaaacaaattcaacgtatcgctatcaagtatgcagcagatcatatttctgttaaagaaccagattggcaatacgtagcatcgaatcttgaaatgtttgcattgcgtaaagacgtttacggtcagttcgatcctatcccgttctacgatcacatcgttaaaatggttgaagcggggaaatacgataaagagatcctggaaaaatacagcaagcaagatattcaagttttcgaacgtgcaattgaccatgataaagattttgaattttcgtatgctggttcccaacagttaatcgggaaatatctggttcaggatcgcgatactggcgaaatctttgaaacccctcagtatgcgtttatgcttattgcaatgtgtctgcatcaggaagaaactgggttagcacaggttacgcatatcattgatttttataacgcaatttccgatcgcaaactgtctctaccaactccaattatggcgggtgtacgtactcctacgcgccagttttccagttgtgtagtaattgaatcgggtgattctcttggttctcttaacgctgtaacctctgcgatcgtgaagtatatttcacaacgtgctggtattggggttaacgcgggacatattcgcgcaatgggttctaaaatccgtggtggtgaagctgttcatactggtgtgattcctttctggaaacatattcaaaccgctgttaaatcctgttcacagggtggcgttcgtggtggtgctgcaacactgtattatcctttctggcatctggaagttgaaaaccttctggtgttgaagaacaacaaaggcgtagaagaaaaccgcgttcgtcatcttgattatggtgtacagcttaaccagttgatgtataaacgcttaatgaatcgtgattacattacgctgtttagtccggatgttgctaacgatcgcctgtatgatctgttctatgaagctgatcagactgcatttgaagaactgtatgaaagcctggaaaaagatccaactgttcgtaaaaaacgcatcaaagcggttgacctgttccaacttttagcacaggaacgcgcacagacaggacgcaaatacattttcaacactcatcacgtcaaccaacagggtagttttacggttcctgtccgtatgtctaacctgtgttgtgagattgcgatcccaacgtcgccgctggatgacgatgataaaatggctggtgaaatcggattgtgtacgctaatggctatcgttctggataacgctgatatcagcgaattcccgaaactcacacgtattgcagtacgtgcgcttgataacctgctggattaccagaactaccctgtaaaagccgctctgaaagctaaacagcgccgctctctgggtgttggtatcaccaactatgcatcatggttagcaagcaactattgcgactactcagaagcgtatacagacaaagttcatgagctaatggaagcgtttcagtttaaccttctcgttgcttctatggaactggcgaaagaacgtggtgcatgtggattgtacaacgataccaaatacgctcgcgggttactgcctatcgattggtattgcaaaaccgttgatgaactggtagcacctgtttataattgcgattgggaatggttacgtagccagattaagaaatacggcttgcgcaactctactctttctgctttaatgccttgtgaaagtagttcacaggttagtaactctaccaacgggatcgaacctccgcgcggtttagtgagtatcaaatcttcgaaagaaggacactataaccaggttgtgccgaaccagaataaccagattgatttctatgatctgctctgggatatggctaaacgcggtaacaaagggtatctgtctcacgtagcagttatgcagaagtttgtagatcagtctatttctgcaaacaccaactatgacccggcaaactatgaagacgggaaagttaaaacagaagacatcattgatgatctgctgtatgctaactactacggtgttaaaaccctgtactatcataatacgcgtgatggtgctggtgatgaagatgaagccgccgacgattgcgcgggttgtaagatttgattaatgccccttcgggggctttttaaaggtaaagacatgttaacagtaatgaatacaaacccagatcataaccacttagatcaacctatgttttttggtgaagatactggtgttgcacgttatgaatcgcagaaacacaaagttttcgaaagcctgacgcaaaaacaactttctttcttctggcgtccggaagaagtcgatctatctactgaccgtatgcagtatgcaaaacttcctgaacatgaaaaaatcattttcgattctaacctacagtatcaaaccctgttagataccattcagggacgtgggcctaacctcgcatttttgccaattgcatccgatgtgagcatggaaacctggatcgaaacgtgggcgtttagtgaaaccatccacagccgtagttacacgcatattcaacgtaacttacacatcgatccttctgtacagttcgaccaaatccttcgcaatgaagcgattatgaaacgttccgcatcaatgacacggtattatgatactctgattgatgaatgtcataagctgaaaaccatcatgatgctacaggaacaggttagcggttataaaccaaatgatccggctgtcgtgtattataacgagcaatacgctaaacaggccactaagtgcaaagaagcgctgtacctgtgtatgcacgctgtgaacgctctggaagcgatccgtttctatgtgtcgtttagtttcacctttaactttgctgaacagggcaagatggaaggcaacgctaaaattatgcgcctgattgcgcgtgatgaagcattgcatcagaaaggtactcagagtaaaatccgtttgtggcaaatgggtaaagatgatccagaaatggttgaaatctcccgtaggctgaaaaaagaagcaacggcgattttcctggaagtatatgaacaggaaaaagaatgggctgaacatttattctctgttggtgatgtagaaggtgtatcgctgaaaagcactatcgcttatattgaacaccttacagatcagcgtatgcgagcggtagggcttgattcaccattcaccccgatccctaacccgtatccgtggatgaataaatggctcaaaagtgataacgtacaggttgccccgcaagaggttgaagtaagttcttacctcgtcggaaacttgaatactgaaatcagtgatgaagcgtatgcaaaatgggccagcaaatacgcgtgattgtcgggtagtaaacaagtacaaaactgattgggatgtcgatattcaaagaggtacgaagttcggcaacccttatcacacaggaacaaggggagaaaacattttagcgtttatcccctggttccagaatcaggttcgtactggggcgatcacgattgaagaattgaaagaacttgatggtaagaggcttggttgtacttgtgcgcctcttccctgtcacggtgattacatcgcgcatgtggttaatgttttgtgtggtaagaaaagatcacttgactttttggatatataatgtatgaaatctgaattcaacttaacccttgataaatgtggtcgcatcgatcgaagttttgttaagtgtggtgaacttaggcattgtgtttattttattgcaattaacgatgaaatagtatatgttggtaaatgtcgggatatgtggaagcgtttagacacatatcgcaatgcaaagtattggagagaagccaaccccagcaacatcttaaaaacgtgtcgattggaaatggctatcaaaaaacgaaaaactgtgaaacttatcgtgactactcacgatgaaaatacatatcatgattatgaaatcaacatgatacgaaaatacaaccctgaatggaataaacagcactatgacaaaggcacaaactaaaattatcaataccctttacaaacaactcatgcagttgtgtggtgaatccgaaacatttttcttcgttgatcaagtaaccgtgatgggtacacctgttcgaatctttaactatcgcatggcctcatatacagactggctaaagcctggtgctctggaatgtcgtggtatcatgtttgaaatggatggagatacccccgtatcaatcatcagccgccctatggagaagttttttaactatgccgaggtaaaggcatgggaagcgcttaacgagtctcctattgaattaggcgaagttttagacgtgatgattaaagaagatggttccttgatctcaactttccttgacggtggatttctggcggtcaagtctaaaggttcggttaaatcagaacaagctatggatgcgcacagcgtgttaatggcaaatcgtgaattgctgacccgcttaactgagatcgctaaagaaaactatacggtgaacatggaatacgtttccccgaaaaaccgtattgtcgttggttatgattctcctgatctgcgtatcctgaacgttcgtcacaacatcacgggtgaatacatcccttatgatgaactctttgctgacgcgctgttacgtgcgtatctggttaagcgtgagaatatcgaagtactggatctggatgcattcgcaaaagaagcatatcagaatgaaggattcgaaggctatgttgttctgacaacgaaaggttttgtaaaaatcaaaacaaactggtatgtcaatctgcatcgcacaaaagatagcattaccaacaataaggatcttttcctaaatattgttgagaatacggtcgatgacctgaaacagctattcagttcggatctggtctctctgaaaaagattgacgatttcgaaaaacttttccttgatagtctcaatcgtttgagtgcaaaagcgttcaaagccattgaagataataaagggaaatcgcgtaaagattttgctatcagtctaagcgcggatttgtcaaacgacggtcggattatcttcgggcctcttatgaagtatttcgaagaaaccgatcctcaaaaactggttgaccggatcattgatatgatggttaaaaattacgaccagttcattcctgaacaatataaatgaggttcataatgcctaagatatcatcttgggtatggcctgtaatcgtggggctatctttgatagcccttttttacattgcagtcgataccaaaattgaaaacgcatcgttacgcaaggatatcaaatctttgcaagatgatgtgaagaaagtaaaagagacaaatacaagcaatactgttatctacgtggaacaaaaatccaaagatcagcagttagtcaaggatgcagggcgcaaacaccttttgtttgagaaacctggattgattgaaatcaaaatcaacaaatccttcgacgaatacatgcaggaatttgaaaaatgaaattagcaatgatagtattacttggtgtttttctcgttggttgtgctgaacagccacctgttaaggtacttcctacgctacccgcaaaggttaaccccgtgaaggtaaaatggaaagtaattgcagacgttagagaaatcgacgggaaacaataccttgtaatgccatatgatggtaatccttatgttgcattgacatatccagattcattgattttacgtagctggatgaatgacgttaaacgacaaaaggatcaaaccgataatgttctgtgtacgttgggataccctgagaaatgcaaatcaaaataaccaaaacgttttttcgtgacataacagaaggaaaagtttatactgcgaaaaaggataaagaaggtctatggatagaaaacgattggaatcgtgatatatggctcaatctgacgaatgagtataacaaagaactaattgaatatgagatagtgaaatgaatctgtttatgactattggcgttccgggtagtggaaaaactacctgggcgcatgagaaagcccgtgaattgggtaatactgttacgatctctcgcgatgatctgcgtagctctttgtataatgctggtaagggtgctggcggatacaaatacaccaaagcgaaagaagacatgattgcagaaatgcaggatcacgttgttatctccactctgaaagatggtaaaaacgtgatcatacacaacacacatctgaaagaaagtgataaaaatcactggcgtgaaattgcgttggaacacaaagctgattttcatattgaatattttgatgtgtctattgttgaactgcttcgccgtaaccacaaacgcggtcgtgatgcattacccgtttcgcgtctttgggaaatgtttaaccagtatcgtaagatccgtgggttcgtaccagcaatggaaattgttaatccccacaatcagaagtgtgtgatctttgatgtcgatggtactctaaccaaagtgggacaacgtagcccgtatgactttaccaaagtgatcaatgatccgccaaatatcccgatccagcaactgtttcacctgtacaaaaatgcagggtataagtgtgttgttgtgtctgggcgtgaaggtaatccgcaatgcgcacatgatacatgggttagcctgttgagttatggcgttgaaccggatgaaatttttatgcgtcaagaaggtgataccaggacagattttgaagtaaaagaagaaattttgtttgacaagattttagataagtattatcctgttattgcagtggacgatagagacactccggtcggaatgtggcgagcaaacgggattccgtgcttacaagtcgattatggtgatttctgattgacatataatgtgggtatgttaaagtacccacacaaaagaggattatattatgaacgttattcgtgaagataaacacatcatggttgaacttggcgatcgcattcgcgtagaaaatctgggcgattttaaccaaaaagttcgtttgttgtgccaaaaaattgctaacaaaattcaggaacagggtaaagctccgggcgggtttgaagttagcgccactccggtttctcagtactcctatattgtgtatattcatgacgtggatactaacagcacccaatctttcgggctggtgttaaatcctattactggctacgttacatgggcggctgtattatgaacgtaaaaattattgatagagcggtaattacggacgaatctgtatacccagatcctcgttattatggcggtgttttcggatacatcaaaggaactgatattgatgtagtaacaagtccgatcgccgaatacgatatcaacaaagatcagacagaagttcgcgttactacaatcaacggttcagaatatatcgttgaagcgactcctgattttatcaaacagttactaaaggtgatgaaagatgcttgatcatcctggctctatgagcatggtgcttctggaagcattgaaagcatatgatatcccctgtcatttcggtgaagtaactgttaatactatcgttgacgaaatcgacaatccaaatactttcattgcttgtcttgttcgaaaattcacaagttgttttcgaccgagtccagaaaaagtagtaatcagttctgtttctgcacatcatcgagtgttagatgatggaaagattcaactttactggaaagttctttatcacgtggtgtatcatgaagattgatgatattatgtttatgcttagagcaataagcgcttctaagttctctcaatgtgtctccgttaatgttggtgctgcattgagaaatggtaacgggcgtgtgtttgtaggcgcaaataatacggttgatcctagtcatcgttgtacagatcagtgcaatcacttattagatgataacgggaaactgagtgaagaaaagcgccctgaacattcacaatggtcagatcgcaacgaagtacacgcagaaatgcgcgttattatgctggcggcgtctcatgaacaaatcaaagacgcaactttgtatacaactcattccccttgctcacaatgtgcgaaaaatatcgaattttgtgttgcaacaggtatgattaagcgtgtagtatatctacataaatacgatcgtggtggcatcgagtggatatggcgtctacagcaatacggtgccgaagtagtacaacttgaccccgaagaattgaataaacattttcggatcaaataaccaatgagtaaatatatgtctgaactgagtgtaaaagcatcctttgaatatgttctgattgaaaccaacgctaaagcggctggaactgaaattgtatcaccttctggtatcgtgactggtgttcgtcaacacggcgaggaaccgatctacggcacagtgttatcatgtgggccggatgtaccggaagaatataaaaccctgcttatgggtaagcgagtaccgcttcctcatgcacaaatggcaaacgtgccggatcctgaactgattgcaggaaaggcaacaaaagaagaagctcgcaagtatccggttaaatatgtaaccgcacactataaagcgattcaagcaatttacgaataagagatccaacatggctaaacaaattcaagcaatcatcgccgataccgtcgcaaaatccaaaaaacttttcgacaaaggcgacatcctcgaagcaccgacccgcatcgatgtaatgacttcaatgatcattgatgctcaccagggaaaactaaattcccgtgcttcggaagtaatggaatacatcgtacagttcgaggatgtatgcaaatacgccaaagctgttgatccggctgttcgcgaaatctaccgcaaacagttctaaaaatattggccccttagctcaataggtagagctaatcactcataatggttaggttcccggttcaagtcacgggaggggccaccaaacaaggcaaggcacttagagaagcgggaggaacagaatctgattctgttggttgtaggtgcaaatcctacccttgccaccaaattagggtgcgtagcgcaatgccgttaaatggttcggaatatgcaacctttctcacggagaaggctctgttggtatccggtaataggttccccggaatgcggggtgaagtaaagaaactcccagcccactaattttaatgaggtttatatgaaatttcgtgaaactgtgaaataccataacgcggtcgaatatacacagatttttgttgatatgtctcccgcaaaattcaaagaacgttatggcatgacatttaatgaatggaaagatggattgcccgatggggactaccgaaaaaacttcaaattcaatgaatgttatgtggatgatgatccttacgatctggatatttttggtaaaacaacgcctctcattgagaattcgccagaacagctttacgaatcttgtattgactctgcatacgaaatttaaagagataacatgaaaaatttacaaaaactgtttgaaatgtctccggcaattagaaaaatcatcggagaaaatagcaatccaacgaatcgcaataaaaaattgatggaactttttgcaaaagagttcgatgattttgattctgaacttcataaagcgcttgaggcatattctaaacaagggttctttgcatcgccgcaagtgaatagtaagaaagagtatagcgaacgattctttgattgggagattgtcaatctcgttcgtagaacaaatatatctccgagcaatcaccaattgatttctcttgatacttcggtattctttatccagtatcttatcagcggtggtttcaaaaatcctgaaattccgtttacaaatgaagcggttagcagtgaatttgatgaatcatttgtatacatcaacacaaacaaataatcaaatggctatcttcggatagccttatttttggggtgtctatgcgctttttaaagtatgcaagttggatcgtactcgtccctcttgacattattactggagtattagcaattctgtttgccccgtttgttgtaccattctacaacgagaaaacagggcatcttcctaaaggcttccggtggatggaaaccttcgataaccctattgatggtgatggtggacatatccgccgttgggcgtccatacgctatcatctgggggcttttggggtgtacatgcaacgtgttggctggttgtggagaaacaaggcttataacttcgcatatcacgttttaggacgtgaagcgacaagcaaattcaactggaaaggcaacccaaaaaccgaaggtgggccgaaccctgtaaataatgggtatctgctcatgtggaacgaatcagcatggggtttgtacgtttacaaaccgtggctacggatccacaaggtgcaattctgtttgcgcgtttatgctggatggaagctgaaacaagaagttagcgaccctgttaacctggatcgcgcaatgctggcgtttcatttcaatccattcaggtattatgtaatcaagtaaaggtaatacaatgaaagcatttcaaattttagaaggtttgcatacgggtacaatctatctggaagaaggtaacgacgttcggatcgtagtatcaaaaacattaactatggattctgtgatcggtaaagctcgcgttactccgtttgcaaagcgagagatcgagatcgaatatcagccaactgttaaagtggaaggtggacaacatttaaacgtaaacgtgttgcgccgcgaaactctcctggatgctgttgaacatcctgaaaaatatccgcagttgacgatccgtgtatctggttatgcagtgcgttttaactcactgactcctgaacagcaacgcgatgttattgcccgtacttttacagagagtctataatggcaatttctgatattacgggttataaaccccatactgataaaaaagtagaaacagtaaaccgtatcaaagatgctgaaaatgcattaggtgcaatcctggaagatatcgaacagcgactatcaaattcagatattgattcgctgatagaggaagaattagatgaggtgcttgaacgtatccatcaaattcaactagcgaaagaccgactgaaagaagcctctatgtgggcgtgtcgtgcggtgtttcagcctgacgaaaaatattaaaaatcaagccgttgccgaaaggtagcggctttttcttttttggtgtaaaaagttgttgactcccttctcacattcccttatagttaatcccgtagacaagaaaacacttttatgaggatgacattatgaaacgctcttacaacatgaatgaactggttttcttcaaaactcgtcgtgaagcacgtgcttacgttctggcggctggtaaaaatacttctgctgctatcgatatgggtactgataaagctgttggtgctcgttgggccgctgttatcgttatcgctgctccggttactccggttaaaactctggtacttggtgcgcgtcacgccgaaactcttaacactgctgcaagcggtaggggccacgaagttaaagtgttcaagaagcgttcttatctttcatgtgcaaggggttaactatggcacgattcatatataaagtggaatacgaaaatactgaattatctgatacctttttgaagatgattcgtgatcacgggcaacgtctggaaagagtaacgattgatactgcttttgattgtcctgttgggttggttctgacattatcttgcagccccgcaaaagaatcagcccgtgttgaaatgttacataaactaaatgcattttatgaaggtggtagtgtatggcgagtattgtaaaatttttcactgactcagtgaaagaaattaaaagcgctctggaacaatggaacactcgctgtgatgtatccattaaatcagagtacgaaacaacttatgatcgttatgatcaggcccgtggcttgcacaataacccccatgaggtggaagtgtgaaatactacggattcaaaacgagtcattttggtaaagcgtatcgtacagaaaacatcgatcgcaaacgtccttactatgattctttagtaagagcgggacgcaaacgcgctcgccaggaagggaagaaggaagcagaaaatgaactttgatcaacccattgcaatgataatcggtgctgtcctgggaatgcttcttttgtttgggggtattcctttaacagcgtatattttaagggtgattggataatggacatcggatcaggtagccagtacccatcatgcgcgttaagcaacttcgcccctcatccttttacgtttgacggggtagaatgtgcatcaatggagggctttttacaaagtctgaaattcagtaatccagatatgcaagcccatgtatgtactctggtaggcaaggccgcaaaattcaaaggcaaaaagaaaaaatggtggactaaccagaccctatactggaaaggtatccctattcatcgttcctctgaggcgtatcaaatcctgattgaaaacgcatataatgcgttattccttaatgaagggtttcgccgtgcgctggcagcaaccggaaaaagtaccttgacacattcaatggggaaatctcgtatgaacgaaactattctgacagaacgagaatttattagaaatttgaacaggttgagaaatttgttatgaaaagcgctgataacctaaaaaaagaaattgaaggaatcaagaaattattgcattatatcgatgttgatatagagactggaatatgtacttggaaaagacccagaaaatctataaatgttggtgatgttgctggatgtaagaaagaaaaatatcatgttatttgtttcgattataggttgtatagacgacacaggattgtgttctattttgctaaaggttacttacctcaagtagtagaccacattcatggtgttgaacatggcgacggtattgataatttacaagaggcatcgcaaagacaaaacgttattaaaaagaaaggacagaaaaacaacaaaagtggttatcgaggggtgtgttggtcgtctcgtgctgaaaagtatcgagcaactataggtattgatggaaaacaaatacatttaggatatttcgatactccagaagaagcaagtaaagcatatcatcaaaaagcgaaagaaacttttggtgatttttataatccattggttaaatgagatctgttatgagtgaaaaagaaagagtagaatgcgtgtttctgttcaaaggcgcgattaatccattagcgttactgtatgcgcaacatgcattacgttcaacgttgattcagagtgttatctataaagcaggtgtgtattatgttaccatcggcgcaaataacatggttgttattgaatcctacgttaaggaatgtgcatcaaacggcgttgtctttgataaagtcgattttgatgctggggtagatgctgtttatatgtataagggttgatatgagttacgtagtttattttgattgttcggatctcgatccgttcgttctgcaacaggcaaagaaatatcatcaagatgtcgttggtattggtgtaacaaatgatgatatgctgtgcatcgaatttgaatattatcggacatttgagcgtgattatttcctgggtgaattgaatgcattcaaaagtacccttttctttgatcgttatgaggttatatcttgaaacctgttattcttaccgatattgacgggatcgccgtaaaatggcagtcggggttgccgttctttttgtctaagcacaacatgcctactgatattgcattagaaatggttacagatgaaaaatttcgtgatatgactgaaatcttcggatgtgatcagcagttggctaaaatccttatggaagaatacaataacagttctttcattcgttatctgaatgcgtatgatgatgcattgattgtgatcaaccgtctgaaaacgcagtatgatttcgttgccgttaccgctctgggaacaacaccaacggcaagccttaaccgaattgctaacctgaatactcttttcccgtctgcgtttaaagaggtgatggtcgtgggccacggtgaaacaaaaactcatcgttacctggaagcaaaagcaaagtatggtaatcgtctggtttgctttgttgatgatctcgcgataaacttaaacgaatgtcataacgtcattagtcagttgccgttattccatatgttacgtggtgaacgtgaagaaacaaatgcacctcaccagttagtaaaatcgtggtttgaaattgaagagaaactaaatgatcttgtcaatccttaatgaacttgcgtctactctgaaaaccaaagagaaagaagcaattttaaaacgtaatgccgataatgaattgttgaaagaagttttccgcattacgtatacaaaacagattatgttttatgtgcgtcaatttcctctggtagaagggaaaccaggcacaacaccgctttccgatgcaatcaaagcattactggaagatttagcaagccggaagtatacaggcaatgcagcgcgtgatcgtttactggatattgtatcatcagtgaacattaacgatcgtgaagtgctacgccgtatcattaaccgcgatctggaatgtggtgctggtacaaccttaccaaacagggtatggaagaaactcattcctgaacagcctcaatgcctcgctacgccgtttagtgaaaaggctttacgtcgcatcattttccctgcttactcgcagcttaaagccgatggtgcgcgttgcatggctgatttgctggaagcattaaaccgtaaggtatcgagagcgggtaacgagtacgaagggttaactcagcttgatatcgatctgaaaaagattcgcgattatctgggatatgatgtagttctggatggagaattgatttatgttccttccggaaccgtaccaacattacctgaacctgaaacagacatgcctttttctttatctgctttcatggacgatgatgataacgacattgcgttatttgcggaagaagttcgcaaagtatcgaccccagaagaagaacaggccgaagcaaaacgcgaagaagggaacgggatcgtaaacaaatctctgaaagggacgatcaccgaagaagaacagcgaaacattgtttatgttgtttgggatattattccatatgaggtgtattacggcgaagctgaaagtgttcagacttatgatgagcggtttagcctgttgcgtgatatcctcctggatctttctctgccttctgttcgtttgattcagtctaagctggttaataacattgcagaagcgaagcaggactataacaattaccgcaatgacggtaaagaaggttctattctcaaaaacagaaacttcaaatggaaagattcgcgagtagccgatcaggttaagctgaaaaacaaaaccccgattgaactacggatcattgatatctacgcgcacactaaagaagaccataaggtcggcgggtttgtggtggaagatttatccggaatggctagaacgaataccggatctgggttaactgataccgattatcgttacgatgatgatggtattacccgtgtatacattccattagatgaacgtggtgaactggatcgcgaatacatcatggcgcataaagatgaatacattggggccattgtagaaatggaagttgacggcctccagaagtcgaaaacgcgtaagaaaggggaaccggaatacagtttcttccttcctattatcaagaagataagacgcgataagaccgaaccagacgatattcatgttgtctttgcagatctattttaataaaaagcccttgactccggtcgggggctttgttatattgggcctatcgaaacgtaaatcactaagagaatatattatgactagtagttatcagaaacacaaaacccttatggcaaacctgtccggtaaacatatcgacgaagtaaaatctctgctgacagtgaccgaaggttcccgattcgaaacaaatcacattatcaaaccttctgtgaagaaagtactgaaagtgatttaccgacatccggtgtatcagtgcgttcatatcatgaacagcaacgcatttattttcgtatataacgaatccgatgataagtgtgttggtattttccgaaaacctaactttgaatgcatgagcgaagcggctgttgcaaccccgatcgttgaagaatatccggattatgttcaacgcaacatgcgttatgtgcaatcccgacttgattatgcatacgatttcaattctgacgcggtagaagcgctggcggatatcctttgcaaaaaccagaaagatcgtcaaatgacaaaatatctgactgatccaacaccgccaacaattcgaatttctgttgaagttccgtttgaaaatcatttcatggcagttgaagcgcttgctaaacttggtttagaagtgaaaacagaagccgtttaatagcactttttgttaaagaagcctcttgcaatgcagggggcttgtttggtatagtgtgttcatcgaaacgaaacagacaaaaggaacatcccatgcaaatcactaaagaactcgaaggcaaagtaatcgttctggtaaatgaagaccgtttggcacaactgggtaacggtggtgaaaaactgccagcggacgcactcgaaagcctttctaaaatgcgcgtgatgcgcgttactgacggttgggttacttgtctgcctctgaacgacgaagacaaagccgtatacgatgcacaagcggattcatgggatatcgaagtacctctggtaaacatcgaagttgaagagtgctacgaaatcgaaaaataatgcttgtgttctgggtaatgtaatggtacattacctacatcgaaacgaaaggagaaacatcatgaaagttatgcacactgcaaatcaacttcaaaacggcaactacgctatccacgatgctatcggtgcgctggttggggtttatcttcatggtatcaaactccttgaagtaagtgggaataccttttatggtgttgaaaacatcgaagcagcgatggaaattatcggtgacctgaaatgagtaagaaactcgaaatattcgaaactatcagcgaagacccgaatcttcgctggtgctgtgcgaaaactgggtttgatgctgcatggggtgatactccagaacaggcgcgtaaaaactgggaacaccaacaattgttttttgcctgtcgggttcctaccaattatgaggggagtcaattgttagcatgaaaaataaagaatatgacccaatagaagttaaagagcggttatcggtagcaagaagattccttgaatctatcgaccctgataaacttggaaaatgccctgatacgatttgccttaattgtgggcgttctgttcttgttggtaagtgttgcgataatccaaatatagttgtgatggaaaaggaacaagtatcccccgaaacatgggatcagatccaggaaatcattaaaaaccctccagcgccaactaagaaattacgtgaattgatgacaaggaaaatgaaatatgagcaaatttaaattgagtgcaaccgttcgccttattcgttggaatggtgaagagatccgttatgatgaccctgaattcgcccatgaaattctttcgcatcgtttgggattgaaaaacgcgtcattggttcaaactgttaaaacatcagcagagccggaaatttggcgttgtgttattctggatctcgataacaacattgattatgatgatcctaagaactatccgcttctggaagcacaagttgagaatgctccagaagacagacagtgttttttggttgagttgccacgcgaacattacgaaaacatcataaaggcccgtaaaaaggtcaataacaatgttttcgatctccacctcggattgtttgaggattaagtactgctagttgtgttcgtcgtagcggcgctggtaggttcccccacctgtatacattcaagtgtttgcaggtggaaatcttttgatacgtctcgaacacattcaacgatcagatattttcctgcgtactcttccccaaatacctcaatgattgcccctaccttaacatctaaacgaccctgctttatatcgaatcggatccggcgttcatagctggataacaattgcattttagacgcctggaaaggtttaccttctgaatctgggttctgaaagttggtatcatagattgcattacggtttgtgaagatccatgtattctctgtgtctgtatcagccagtatatcaccgtacatctttttatcagtcaatgacagactaaagaaactggcgtctttaaacagcgttgtgttatccttatgggtaatgtactgggcttctgtgaatatgacagtatcgccaacaaacacgttatcaacgttaaatttgtatgctgggatcggtgtctgggccagaatgtcagttgaacttttaaggaaaataccggaaccatcttcccacagataacagaaatcagaagaaactacactttgcccgttgtccctgatataatcgaatatatcctgatatgtaccatttagacatccaggagggatacgtatgttaccgccgtcaacttcgggggtaagtagtttcattttgctatacagtgccgtcatacactctgtaatcgtctgtacggcgttgttactaaatgaacgggcaaacttacgtctgaacgttttatgcagcggagagaggttcatacgcagcacagagcggtttttatcgtcagtatctacgttagagtaaagcaatccgtaataatgttgttcctgtgtaccgttatactggaaagatacctgtatgatcggctggataagttgctgatagattaactgtgcgtcgtatatctgcatcagcgtttccgatgagccgttaatcatcgtcttttcactaaacgagacaagagcgggtagcaattcagtatatgcgttatcaatgtatttttcgtatgatgtatataatttaatcgatgtgactcgattgacgattttttcagccataaaaatccctcctaatatatcctatttactaaatagtaaataatgacccaggttcaatttgaggcaataatgaaaaataaaactcttgataaatttatgactacacggcttgaaatcaagaagactaacgttaaaaccgttcatcttccggatggaacagccattgagatccctaagatgtcgtatcgtcattttgtaaagattaagactctgaaagatgacccagttgcgatcatgcgattcatcattgatgacatcaaaccgcgtgaactaacagcagcggaaattgaatttgtgttgatccatatgtatgcacacaataacgctgattatgccaatacgcttaaagaaattgggctaaatcttgatgacctcaaaatctccgaaccttgctatgattttacgtttgacaatgtgcggttagtctttgacaaacccagcctgttaaatgctcaccttccgttcctcatcaaagaggcatatgttgacggtaagccagtagaattaactgaggataaacgagacgaattaattaattgcctgtaccgattcgaatatgatcaggtatcgcgtggtgtcctccaggaagtatacattattcatgaggggaaaaccatcaaagggcttaacatcattggtgaatgataatggctaactcttatttcaacgaagaacaaaagaaaaagtttctgaacagaaacagcaacaaacaaccagcggtcaccaaagtaacagcctcccttgatgctgaaagcgcccgtgacctaaaggaaatcaacgataacacccttgaaagtgcaatcaatactcttgatatcaaagaagggttgaaatcgttcgaagaaaaattccgtgacaaattcgcggggttcaaagaacaatacgaagaggataaaaaggaatcattagccgaacaactacctgatttcgtcggcccgatccgtcctatatccttaaccgatgataactcaaaaactgttgacaatacagtaaacgttaaccaaaatggtcagttcggtaagctggaagaaaacaccgaatctatttttcatgctattaacaaacttgttgatttatatgaaaatactgataagcataaaccgcttcctgaaccagtggaagaacctgatccgtatgtagacactaagaaaaaacgcatcattgatgatgaagacaaaagaagcaaaactctggatagcattgctaaaagcctggtttctattaaagggtttacatcgcagatccttagccgtttcattggttactctctggaagcaatggcaaagtttgctaaatggacgctccttattggttcgttaatctttacattcgatgtgttgcgcgtcacaatacgcaaatggttcgaagatatcctgaaagaaggggaatcctcaaagaaactatttggtacatatctgggtaacgtaaaggctatcgtaacaaagatcgaagaaggtttgaacaacttcaatatgaataacttaggagaatcactccgtgatttgttcgttgagcctatgaagttgttgggacaaactgtacaaacggcaatcactgagggtatcggtcgtcttattcaatcattgggtgaatcaactggcatagacagcattaccaatgccggacgcggaatgcagatcaccgctttacgtgataaacagaaatttggtcttgagttgaccaaagacgatattatcatgattaagaaacaagaactggcagaacaacaggaagcattggaaaaagaagataaagccattgcagcacgtcaggcgttgacgatcactcctagccagatccccaacggttcgatctacaaagtagctcctactgattatcaggaaagaaatcagaagattgtcgatgctgacaaagaacgtctggatactatgaaaaaacacaccgacgaattaaaaagtcaggtgaaattgattgaaggcagtgcagaagaagcacagaagttagccgatgaggaaaacaaacgcaacagagagcgtgttcgtcaggcacaaatcgaagcggatcgcctgaaacaagcgcgtaaggaaggcaaacaaccgccagaaggatccgagaaaaaaggtgatgatctgttgggtaaagcaaccaactatgctaactctgaaaatctggatgcagccgatatcaaatacattaacgatgaactgttggatcagcttgaaaaacgtcgtaatgaaggcaatctggacgatgtacagaaggatagaatctctgaccttatcgagcaattgcaaaacaagattgcagcccgtacagaatccagcgccccgatcgacgcacagccaccgttagcagcaaataaaccggatgctgataaagcaagcaacattcaggttaacaacaaaactgttaacaacaacgtaactcattcagtacaacgcacagagcataaaccgctcgtagcgctggcataaggaacatataatgaagttttctattattgatgacagtataaacactctcaaaaatattaaaaatcgcggtatcccctctgggggtgccgctatcacagaatcagtattaaagcaaactatcgttaccgccgaatttccggcccaacgtgcagcaggtatcgataacgcttataatgcttcaagtctgtataataacggccttctgttcactgcatatgattttaatggtgttggtagtaaagacaactatcgttcattacgtcaggcagcacagaacccaaaacaaatactatcatctgcgacgggtaatattaagtacaaacaagtgttgaatagttctattggtactatggaacctgtttgccagatcctgctaccgcgaagcctgaacgataacgaagtaaacagccaccgctatcaagatgcaaacgatagtttcttaaccaaagggttgagccgtgttgtttcaaacatggtatggggcgctgtagaatccgtttcaggcggtattatggcagaccgaagagaagcccttgatgttggtactaaagccgctttccagggttctgacaagcgaacaaagatgtattacaatacattcgtgatcgaaagccgtaatgatttgctggaactgattaaaatctactatctgtttactgttctgggatatggtacaacttctggcggtactgctaaagaggttgctgcattggttaaacagtattacggtgttctgggtgctaaaaccgctaacgcaattagcccttccagtaacccagtaacagcgtcagattttgataatagtctgggtaatgacgtggttgatttcatttcaaacgtagaggttattaaatcgcctcctgtctggtttattcgtgatttccagtctggggattccttgcgtttacctcattcaacctttgggccagcaggtattaccagtgttcgctttggtcgttctattgataatattgtaaatacattaagagaatcaccaaataccccgatctcacttgaggtcgaaattcaatttatggaactgatcgatatgcgtcaggattctatttttgatacaaattactaaggagatatgatgttttacaacgtagatgaatttttatcaggtatggctaatcgcgattttcagcgtagcaacctgtttagcgttgtatttgcaaccagccctgcatcacgtatccttgacaacacgatcggtagtattcgagatactttgattgatggatctattagttctatcaacgcaaacaacccgaacgaattcattaatgctatcactggcggtgtgagtaaattgtttagttacaccgtcgataaggcgattatgtcgctgaacaaaacaggatttagcaaaatcatcggggcaattagcccccgtttgattacttccctgtttggtgatagcatgtatggacaactgctatctgaattccgtgatgaaatgatgtataatatgggtttaagcattatgggagttaacctccctggtaaatccattgggtacgaatacgtttataatggtggcgtacctcaaatcagattcactcgccctgagaatggggaattgtcattgacgttccgcaccgattcagaagcccgtaacctgaaaatctttaacgaatggatttccgctattcgcgatgatgtaacaggacaatacgccttcattgatgaagtgacaagtactattcaggttaacttacacgatcgtgatggttcaccgcatacaacatacgtatttcagaagtgcttgcccgtcaaaatcagtaacagtgaattgagctatgagaacaacaacgaaatctggacatttactgttgattttgcctataaaacatcatgggttgttgaggctgataaagaaggctgggaagggttcaaacaatccgtagaggaaggtttagccattgcagcacgtaccgcaattacaggacaataaaggggctacggccccttttgaggatcttatgtttgatattattcgagtaacattaccatcagggatcaaacgattccctatgtttacagttaaagatcagtttaaattaatgctgacccgtattgatatggaaggtcggccccttaaagagcaacaggaaatactggatgaagtgctggatctgctttatcctgggtattccaaaacagaacaggaatacattttcagccgggtgtattgtggttcgttcggtaaaaacgttatcaaggttgtgataggcggtaaaggtgggggccactccgaagccttcatggtgattaatgatattcaactggaaaacgaatacaagctgaatgatgaaatcacattagggtttaacttcccccgtacacgcaatacaagcgaagagttgtttcttgaatgtatcagttatgtaatatacaacgaacagcgctatgaatggacatcactaaccgaagaaacgaaagagaatattcttgatatagtcgaacttgatgatgtcgaaaaaatagttactatgctaacgaaatcggttgatgtgtctatgcgcggtaaatcatttagtggtatgttaaccctgttcaagatcctgtttagtcgcggggatctggatgaatttgtgaagaccaactatctgctaaataaaaacggcctgaacctggaacctatcatgaatagtagcccaatggaaaggcaaatttatactgcattgcttgcagaagacttgaaaaaacaaggtgctgttaaatgagaaagcatgaatataaacacgttgagaaatataatgttgattatcgtcctctgacacatacagagtttacccccaatgcagattttatcaaaggggatgtttacctgtatcaaagagaatatcttttcattctggcacttctggaaagtaaaaatattgatacccgtcaactgttcatcaactgtgaagaatgtcaggaaagaatagaattccagcttaaacgcaatcaaatcatggttgaagatttcgacgataagctatacggcaatgacggaatcgcgctatctgttcaccctcgtaagactggtgatgaagagatccccgatcttatcgattacgtaatgatagacggcgaacagatcatgtggagtgattgtagcgacaaagataaagaaatggtgttggatgcaatcgactatgcaacctataaatcgatttctaccgccctggataagccagcagtggtcgcaaacattccggtaaggtgttcgtgtggacatagccatatcgtctctctgagaggcttacagcaatttttaaaggtggtctaaatgggtgtaaatctgaggttgctatatagcgatatagaacctaacatgcaacgagattggaataatgacgtagcggcttcaaaaggggccgcagcagtaagaaatagtttgattggtatcgtaaccacgatcaagggtacacgtccatttgatagtaactttggttgtgctattagtgatatgctgtttgagaacatgaaccctctgacagcggaatcaattagaacttctatcgtatctgcgatccggacatatgagcctagagtatataatctttctgttgaagttattccacagtatgatgataactcagtaacagtaaccatctattacagcatcattgatgacccggatgacgtagagcaaatcaaactacagctttccgcatcataacaaaaagccccttcctttcggttggggctttctcttagaattcaatgaatcccattagtgtttgatatcgcaattcaaacggggagatataactttgcatctggttttgatcggatacgatgtaataatacacctcatcattatcatcgtatagtgcttctttgatgatgcaatatcgatcggtttccacgttcacataaagagtatccatgtactttgtaactttggaaccctgtgaactgatctcgtgaatagcgttatctatgaaaagcgacaatgcttgcatgaagttatcaaactcaccatattcacagcccataatagaaattgcagtgtattggtgccagcctttgattgtgtctccacggcggatccatccaatttgtctacccccgatagatacacaccacactttaccaacgggactatagaaccgcacaacttcttttaataacagggacatgatcccacattttgtataaggattcatttcaacctcatttcatatcaagtagccaggaagggctagtttcaagcgaaattgcagtatattcgtattttacagtataacctttgaaaccgaaaggaatgactgcattttcattgagatattttactttatgctttgcttcttcttcattcagagcagcacagactgttgtttgttcaacgttaccagcaggagaagtaaatttttcaatgataatgtatacgcagttcatcctattgccctctttccattttttcaagtttcagtgtatccacttgtagttgaagtttaagaatacaacctttcgatatgttatacaagtagtcactaacgatttttgactttacctgatcgtaatcagaagataacgtaatccaatcatacatcgtttggtatgatggaagatacgtacattgttcttcttttgataacgctttaaatgattggtaatcggttggaggttccgaagcaattgcggttgtggtcataagactaagtgcaagtagtagatatttcataatgtattcctcattgttttcgatagaaccaatatagcaaaaagccccgaccgaagtcaagggctttttcatcaatgcaagaaagatttcacgtactgttcgatcttttcacgacatgtatcaactgaggtgctttccgcaattacggcatgacataacgcctcgcctccgacccagaaactcatcatgtactgaatatcacgaccttccatttctttttgatgcgctttgattcgatcgaaagcgttttcgattgtttcagtagcagtaagcatttcggattccccgtcaacctccgccagttccccatcgatcatttcgctttcgacttcttcccagtatactatcgttatcatgcattaccccagtggttaaccgtcgtaatccccgccacaattcacatcgccttcaatgaacagttcgcggttatcacgtaataaattatactttctttcgagttcaggcccgaacgcgtcggcgtcttcataccagctataattgtatcttccgcattcatcatcatattctggttcatcaccgtgctcgttgaagtgaacaattttaatatcgtccatccccagttctttcagcttatcccagatatacgaaatctcaacgctatgggaaccgaacgcttccagtgagatcgtaccgtcgctatcgacttgaggaacaccccacttcgaacgagtatcatcggtgatcatatctattaatgactcaatattattctcaccgtagatatcagcaacttccttttctttaccagggcgaacaagtccgatcccgataataaagctactgcttgagctattgctcacaaacccagaacgaattttcatcgcatcaccatattaccaatcatgaatagagggattagcgcgaagacgataccccatagaatgaccttatcttcacgacggtcacacccataatagataacacctccagcgaaaatcaatacaacaactgaaacgaacgcgaataaataaatcatttgcaggtatccattctcatagaaacttctttcaggatcttattcagatcgtgaagcgcatcttttacgttaccttcgttataggtaagcatatcctggtacagccctttcaagcaacgattgattacatatgctttttcagaaggtaacattgtaccagagcgattataatctctgaaaatgtccatcatcgtgccgttgttaccaggtaatgacgggttgaagttaaccataccggacatcaaactatcaacatacacaactgttgtgttatcagaacgatacgcgccaccaactttaaaccagttgctgaacacatacggagattcccgcacttcgctcaaatcggttccgatttcatcgatgtttacacgaatgttgttaaaatacaccgattcatcaatagaaccatgacgccataagatagcaccattgttatttttgaatccgactacatcaacctgccagccgttatctgttaaccggacatcatcaacgacgatgaaatcaggtagctgtgaatgaaagccgatgttttcaggacgggaattacgaaacccatcacgattggagaaataaaggatgtcgccttgattcagttcgcatatattcataagatttttaaagtccaattcaagtaattccacaagtcacctcaaagccccctttcgggggcgagatctcattagagtttaacttctttttcttccagaacgattgtgcaatcaaatttcacatctttccagaattccgctgcaacgatatctgttgcggtaacgcttacgctggtttcttcgaaatccagatccgcaaaccatgcgtgtccgacgacaataccgtacattacacgactcaggcgattattaagggcgcgaacctctttaatagtttcctttgtctgcttatcaagatactcgatcaggtcattcttgtcaagcgcttcgatctctttagatacggtatcgtaagcccacagaatgatcaggtcgccattgttgagtttcttcttaccttcggcgcgttttgcaacggtagccgcaacagccggaagtgatgaaacgcctttgattttcacgttcagttctttcgacatgtaaacatcagtcgattctgtgcgctcaaccttcggagagaagccgtaatcacggatcccttgctcagacaaccattcaccagccgcctcaccaaagcgctgtttaagcccttctgcgttgcgtaaaccaatcgcgttatcacggaagaacttcattaccttctgacggcctttcaggatttccagacggacgttatcagcaacaaattccttaccagaaataccgcgagtcatcgaacggttaaccagaggcagagaggtaaagtcaaccagtacagacatacggtcttcaccaattttagccagcggtttgatagtcagaccagaagcacgtaagtttttcagagtcgggatatcggtttccagcggaagtaccttaacgttaacgataccatctttaacaatggtaaagttacgcacttgtttggtttctactttttccggcaatccaaactctttttgtttgctttccggaatggttacgtaaccttgtagatccgtattgatagaaatgttcggacgggaactgttaccaaccaggtgtttcactgcaactttcgttgtggtttgggtaaattccggtttccatacttcatgcgctaccagttgcgccgccagtgctttacgttcttccggagtagaagcgtttgcaatctgttctgacagtttatccagtgtatcatcatctttctggacagtctgacggcctgtacgattgtacgcccagtgttcagaagacaggtcgatcactgtgtcggtttctgccagcagttcgagagcatcaaccagagtaaacgcgttttcatcaggaaccatgttgtaatcaacaccatccatcagacgtttagccggatcaacaaccgcttcggagatcatatctttagcgttggaataatcctgtttggtaaagcagttatcgtatgctttaatcagacgcacatcacccagctttttcagaactttccatgccagatctggattcatggtatgaagcgcatgatacagaaccacatacagaacctgttcaccttctgctgttgccggatcgaagccgtcaacgtcattgatcgcgttttcacccagcgcccaaatgtttttgatatgttccggaaccagaacaacaccatttgcagcattcaggacatacacacggccttcatccaggtagatcgcatgagttgcatcgccaactttgacttcaacacgtgcggaggtttgcgcggtaatgatttcatcaaatgcaggtacatacgcatcaaacccttcaacgaatttgtgtaatgcgttggttgcttccgccattttttccagcagaggacggtttacataataaccatattccaggaaagcaatgttgttaaacgtcaacggcagagtagaacacgctttcaggatgtcatcagtacgccagcagttatcataaccatcagtcaggaagatcagactgttcagattgccattatccgcttgcagatcggtagcgagttcaaccgccagttgcagaggttcaacgaagccagtacatccggtcggacgcagataacgatcgatagcatcattgattttgctcaggtcggatacagagctaaccttttcgcccacgaatacagaaccgaactgaccacggctggagaaatacagaatagatacggtatcatcctgcttaaccagcgttgccaggttgtttttcaggtgctgacgaatgcgagggagttcgttatacatcgatccggatacgtcacaaacaaaaacgtggttagtcggggttggtttggctacggcgtttttgaattcaatgttagtgatcataattttctcatttataggtaaattttattaaaatttcgtttacttttttgctaatagtatctaatgcatcatcgcatccaaacttactactcaacaatgaaacaaaatcatccatcgttgttgtttgagactcgccaacgtcaaaagacagagcgtaggcaacaggatttttaatccttacgatttgaatagtatactcattcagatcgaaccgttcaagatattttcgcaaagaaaataaatcaatcggtactggtagagtttgactaaacgttatttcttcccccagttgataggggggcatttttacacagatttcgtattccatcagtgatgactcttcatagtgtgttccagattacggaaaatttgcccgtgttcaagctgtgattggaattctccgcattcatcagagtaagtaaattcataaatgaatacaccgttctgattgccaaatttagcgttgtactcttcatacaaccacatcttgatcagagcgtctttctcttctttttccagatcataccagtcacgcccatcataagcaagcgcaatttgaggattagaccgatatcgagtttctgcgctatcttcggtttcccattcataacgcttatcatcatagtatgattcgaaaccatcacccatatgaccacccaggtcgcggtgtacttgctgtacaacttcttccgctgtcgggcaagtcatccagctataaccacagttaggaacacaatcacccatcatttcgcggagattgttgatatcagtcggatccttcgggaaccgtacaataaagctacttgatgaactattgctcacaaaaccagaacggattttcatttgatttcctcaaattcaaaagcggtgaaatgttttctttcgtcatacccaacagtacaacgatgcgtttgctttcctgtgaatccatcaaacacagttacacaataataatgcaacgatggaagcggcgtatgcttaatgtacttgatcgcgacgttcaggtcaacggttgagcatacacaatcacacgtttgctcaaaacggtcatcaaaaatcaactcaatgctatagattttcatctttcacttccttcatgtttttcataacttcttcaaaagttacagggatctcgttgtactgttgcgattcttcatcccatacatcgcgatgcccgaatgttgaactttttgcaatgattttttcattttcccatacatcaatagtaacatgatcaccaagataagggaaattaggaactttgttcagcgcatcaacgcagttttgcaatgattcagaaacatgggcaatttcagtgaattcataatcagcactataagaagctacgtaaatcatcaccaccccctaacgatgctaaccagcagtaaacccaggatccagaacacagcaaccgcacaaatacgggccattactacatttccgcgactagtccactccgcactaagaaacaagaggacaaaagttaacgcgtataaaaccatttcaataacttcggtaatcatataaacctcactgaacataacgattgtagttgatgtgccacatgagactagacacaacatcggaaacaatcaaaaggaacaaaccagcaatcattatcaaaaggataactaaccaagtggttccgatattttgttttaacgacaatagcaaacacataatactgacaaaagcaaggaaagaaataacaagcatcacgattgaaggggccataatataaacctcacgaaaaagccccaaaaggggcttgattaatcaatgtccgaacacaccacgaatagactctgcgaatgcatacagttcaggatttttagcttttactgtttcgatttgctccagaatgtaatctggcttgtatttcgcaccgaaccagcagtaagagaaagagcgatcccacatgaacacgttatagtattcaccgttacgaacttcaaccatcacataaccaggattagaacccagcgggtaatctttcagaagattgaatttcgcgccagcaccagtacatccgttaaacaggtcattaaaagtcatggtatgttccttttgtcagtttcgtttcaacaaggtcactatactattcttcgttagcctatgcaagcgcttttttgatttgttttgcaattgcttcgatcaccggaacagatacagagttaccagcttgtttgtacgcctgtgttttgctcttatgcatcttgaatgaatccggaaatccttgcaaccggaaacactcgcgaggtgataacattcgagggttcttaccttcctgtaataccagacattgaacaccatccttatagtattgggctgttatcgtcccagtacacacagaatcaactgtaacggcctgatagccaaaccccttgccgtttgccttgtttcgctctttacgctctctaaagcccttccaggcacgatctgatatggtgtattgatcattatccggttcgagaatgtcaccgacccttgttggggtacgtggaggaactggaaaactaaagaacaccggatcgcgaaagcagacaataaaaacacgctctcttcgttgaggcaatccaaaatcttttgtattcattacctgataatgaatatcgtatccttcgtcctgtaacagcctgtagatggttttaaacgtgtttcccttgtcatgtgttaatagctggggaacattctcaaagaacagcacagagggctttttagcccgcataatgcggagtatttcaaagatgatagtaccgcgaggatctaacatgccctgttttaaccctgctttactgaacgcctgacaaggaaaccccgccaacaggatatcgtgatcaggtacgtcgttttcatcaatggcgaatatatcaccctgaatattttcatcaccccagttatcagcatatgtttgttgtgcatgtttatcgatttcagacgttaaaaggcattcgaccccgccgaatgccttatcgaaaccgagcctcacgccaccaacaccagcgcaaaggtcaattattttcatacgtcgaaatcaacctcatcgattttgtatgattcttcgccaatatcagcccatagctgaatattcacactttttgcatcacgataaagagattgaccacaaagcccacctgtataacaagtttctgtaatctcgttaacttccaggcggaggctattgcgcataattttaacaacagccttttccattgccgaatctagggttttagtatcaccaaatactacatctttaacgttcaaaataacatcactcattatcgccactccgtttcaattccgtgtttgtatgcgtcaacgcccagaggggtgatcactaaacacatatcagtatttttcgttggtgaactaaacgccatagatgcgtagcctttttgaatcagggcatcacgccctgatttactgggtacatcgttgaaatctaaatccaacattttcgacgagtatccgtaaagtttacacagaacatcaatttcagcgccggacaatttcggatatgtcatttgtagtacctcacaacatgttcagaatacacacgttcaatgaaatcattccagaaatcgcgatcaacttctttcggataaccagatacagccgccagcttttcaacttcacacatcgttgattctagcgcctcttgtacggttgcgaaaggaacaccgccagctttaaccattttcaaaaatgcactatccggaagaggatatacaatatcaccttctttgaaaatctggatcaattgcataccaccgcgcaacgcatgagaaagagctttccagtcgatcccgttgttggcttctgcttgccgtgctcgttccccgtattcatcccagagtttatacacggattttttcatttccgctacggtgatcgtagactggaatttacgccccagaacttcataaaattcctgacaacctgatttcagtgttttgtctgtaacgaatcgacaaaactcgttggtcgggaatcggttagaaatctcaccaactttgatgcgcttgccgtaattagattcatccacgttacccagcaatgatgtaccataccagtaatcgggaatcatttgtaacacatcaacaacttcacgcagtgccgccaggcgagaacctttaacaccatacttcgccgcttgcttacgaacataaccaaacaggccagttaattccgtagtgtagaagcgcgaacggttagcgcggagatattgccagatatcagagttagcgatcagcttgctatcatctgcatgaagcatatcaatcgctacggtatcaccatcacatgcgaggctaataaacttttgcagactgtaaatctgacgatctacgtcattaacatcgttctttgagtttttatcaccagttgatgtatcgatagacttcttcgcagtgcctaacaggatttcgcgaggatgagggagatagatccctttgtagtctttatcgcttgttggtgtttccagtccgtacaggtgagaaccgaatacggtttccataatcattttcatcagaattcaacctttaatgtttttgcgatcccgcgcaattcagcggtagtaatatccggaatgtttgttccgtagctattcccaaatacttttttaatcttatcacacaaatcgcggcgatacaccatttctttgtattcttcttcgctacgatacagttgataacccatccacccctcagcccatccggaattgcgcttgattttaatattagtacaacaatcagacccatcttccggtcggaaagatgcatacaggtactgacgcgcaactttttgtacgtaaagggttttggggttgcgattttgtcgctggtcactacggatcccagcatcatacaacgtatcaccaactttcacatcacttaaatcaatcatttacgtctccagcaattagttttttcacagtaatgaacgggaacagacactcccaatgtttctttactgcttctgttgtatgttatcacaatgaatcgattttcgccacccttaacacactccagatccaaaatctcgcgggttcccttcgtgttcatgtctgcaacatagtattcttcgttgttgacaatcactatatccgacataatcaagcgaggtttcatgctgcatacacctctgattcatcaatccattccagattctgattgagtgattcaatcagttttttatcgcgtcgggaaataacaacggtagaacctttttctgccttcacgatgatatcaccagaagaggtaatgtattcaaccacataatcacggcgagggcttccgagtttatcaccaactttaacagcacgtctaaccgattcatgagatttttcggtgaacactaattcatcacctacgtgggtaacaataccatcaacagcagaacgagaattaacataaattttgctaatctccgccatgaaaacactatctctcagatatcgagcagtcactttatctaaacactgagaagatactttatctccgccaggatatactgagataatcattacatgaccctgaacacgggcggttcctactttatgcagaatgtaaaccattgaaccatcagaatctttagatacaaggatcacgctgaaagattctttgtgttgcttctgagtttctccacaggtaaaactcacgtccagaaaatcaccaactttaacagcacggggttttgctacttgttcacgagcactaataacagggatcataatcatttcctcacagtttcaaattcttcatcagatttccaatatacgttaaaattacgacaatcgtgttcggatgtcaacgtgtatttttcatttgttttttcgtcagtgataaccatagtttcattctcgatcgagttaacaccgtaaacgaaaacattctcaccacgtttgtttaaaaacgcatcacccttttcaatcaactgccaacaggtaacaggcaaaccacccggactaaccgggcgggtaacaagacaatagggatgtttaatcatttaaattcttccattgcataggaagtaagatctttgaaataccttgcggtgttgccttctgggttgtttgtaatctccatcaggataacagcactatcaactcctgctttcttagccatgaatgaaagggcttcggtagcaataatcgttgctttcataacatcagctttagaaacgttgattgtattcatttttcttccttttcattaatcacttggtatgtgtgtataatacaaaagccctcacgagaacgcaagggcttttttattaaattttgtataaatctggattcacaataaccgcacataaaagatcatctatatgtgcggcttcttgttctaaggtttgcttagatgaatgtgctttcaagcaacccccgtaaaggcgtttactatctggaaatgatcatcgaagaattccccttgtcgttgtacgacctcatgcataggtagccagaacgcgtctgctgcatcatcagcaccgcccatgatacgaggcaatgaaccatcgttattaggttcgagcttgatatactgtgctacagtcggttttgagaagtacaccgaacgtttcggatgatcgaacagcatcgaattacggatagaaccacgaataaccttttcaggtactttaattcgtacttcttccagcaattcacggatcgcgcaatcaaggaacgtttcgttaccgtttttgtgtccacccggaagcgccaacgcatctttaccaggcgcaaacttacgacgaattactaacacgttgttattacatacgaccactgaatcagccgtgcaacagttcagagaatccggatacggatattttttgaacttgtcaatctctcgttgccagtgtgtatcttcatgggacaaacgttggaattcttttgtttgtgtccattcatcgataaaggaaaccgtagtgctaggcgcatattttaacaaatcttcgtcccagccttcatggtgttcccagataattttgcgtaaattggtcgaggacagatcctgatctccaaccttcacaggttcaaccggaatatgattccatccgaatgctttaagccagtaagaatctttgtctttttcgtacccgacgatcgcaattcgatcatttcgagtttcatcgattgccatacgaacacaggatttccatttttcctcgttatagagataatccggaatgtgagcgaatttgattctggctgcatcttcaacatcaagtttgcagatagaccagcgagtgatcattgcttgacgctgtttagcggtcaatgggtttaatgtgttcggatatgcataagcagaaccgatcagaatgtaaaccgtatcagcaacagcaagggcttcccttaccattttctcatgaccatagtgaaaaggttgaaaacgtccaattactacagctttatcatatttgtgtttcataacgtgctccacgtttaaaggttaatcataaaacagacgcaattatcaacacaccaaacaatccaccaacgaaaccaaagaatagtgaaatgagtatagtcagtacgatctgttttatgttcattatagtattctcgttttagatgtcaagcccccaaagagggggctttaaaacattatttacgagaatcgaaaatcactttaccagcataatccgaacccattacagtttgaggtacgccacctttatagcgggtagagtagttcatctgtacatccagttctttccagcggatcatttccggtgtaatggtgcgttgcagggcggcgttggcttctgcttctttcttcgctgcatacagacgggcatcagcatcacgttcgttagcgattgcagcgttttcacgcgcctgacgatcggcttccgcttgttttactgcttgtaatgaagtctgttctactttttgtagttcagctttagcagcgttaacctgttcttcgcggatcttcgtgttagttacctgttccatgataacttccggtagggtgatatcctgcaagaatacctgtttcacagtgtaaccgtaaggccgtgcataatcttctacttcctgctgaatcgcaatttgcagttggttttggatcttcgcatcaaacaggtcttgcgcttttggtacggatttaccaaattcgcgaacagtggaaagcagtttttcagttacatacttatccagtgcctgatcctgattacccgcgttgatacggttgatcggtgctttgctaccgtcgaattgcagcattacggtcatatccacagtggatttaaatttatcctgggacggaacctgtaatttgtcgaacttcatcgcgatgtctttggtgctgaacgtatcaaacgttgccagcgggtttacaatgtggaaaccaggcagtacgggtttcggtgatactttacccatgaaggtttcagttttaaccgtaccgtcttgcacaatggtatacatgttaggcactaaccacagtgctgcgactacgcccagagcgatcagagaggttttcttcgggttgttcacgatagtgtttaagttcatcataatttccataagttgttgttcaattcgatagttattctatcatcacatttcacgctgtcaaactatttttaagaaagttttgtcagcttgtagattgtttgatagcacaagcccttaatctcgtccaggatgttcttcaaagaactatctactgattcgtagatctcgtttgcttcgttggctattttacggagatacgccaccgtgtcaagcacattttcggtttttagcacaggtttgtatcttcccgtgattcctatgtggatttcggtgaatttatcaaccaaatcctgcatatcttcgtaaaaaccctcatatgctttatgttgtgagtatgaacctgttgcaaaatgtgcgctatgcatataggtaacggacataaggcacatgccaataaaggcatctatcttgcttgagttctcagattctgtaatttgtttaaatgattgcatgatgatccctttatgaacgatggatacttgcaaactcatacgcgaccctaatccctagctttgcgcattcggattcagatcggcattgtttttggtgccattttcgttccatgtagttgtagaatagttcgcttgtatttacgctgggagggatcgttgtgatgtatacttgaagggccgcattgatataatcgtcaaattctttctgaaccggacggtcggcggcgtgtgttgtgggtgtcatcatcaacaatccgaacagcacagccattgatatgcgtttaatgttcataacaattactcttttactcatagacccactataggtctactcctgtatatatttatagcaaaaacgaggccgaagcctcgttataatatttttgctgtaaagtcaatcaagtaatttcataccaacacaaacttctttcgaaagcgcgtattttgttcacgttttctacgttttcgtcccaaccaatcaccccagctttcatacgtttcagttcctgacgtaaacgggtacgtacttttgaatcaattttctttactgcaatagaaagcattgcattcagatcgccatgagctttgttaccgtcgcgacacagattattatcaaatcgaatgtatgcacatcctgatttgtgtttccagttggttgagtaccaacgcaacccatccggatcaatgccatgttgagcataataacgagaatactcttttacttcttcgatcttttcgttagatgaacggtcacgaagaggattgtatttcttacggtaagtgcgactcataatgatctccttttgttttatgcttccactgtatcagggttgttctttagttgcaagtaatgttttcgacaaagtgaaacatatttgtcttcggccccgatctcaatctggtcgccgttagcaacaaatttgccatttgcatcaatacgggcaacggtagttgctttctttccacaatgacaaaccccccgcaactccctgatctcatcagcaagcgccagcaacatataagaaccttcaaacaagttcaactgaaaatcggttcttaatccatatgtcattacgggtatatctaattcgtcaactacccgacacagatccatgacatttttcctggaaaggaattgcgcttcatccacaaacacgcaagaaaccagtttctcgctgtcgctataaaaatgattgttgtgaacatcataatataagtccatatcaggtgtgatcatggtacatgttgcttccaacccaatacgcgaagagatactctgtttaccttctcgcgtatcaattgctggtttgtacatcaggatccgcataccgcgttcctggtagttgtatgcatcggtgagtaaacgagcactcttgccagcattcattgatgcataatgaaaatatagtttagccatttatcctctcaacaaaatctggggtattttggaatttcccttccccttcatggtttttgcatgttttatttgaacagtagatccaccaatcccactcatcataagggggtttggtaatgttcattacacaaattaaagggaaatgacaatcccgacagcgaacattttctataatgtttgcgttagccatgtgtataaccgcccatttcgctatcttgtgcttgatggatatcaagataccacatattgattttgcttttcagttcgtccatttccttactcagacaattgtcaacgatacatagaacattaacagtttctttacgctgcataatgttgatgttattcgctttcatcgcttgcgccaatgcattacaggttttaaccagtgcggcgcgttgtcctttgattacggcgatccgtttgttcgctttcttaatctcccgacctgctttgataggatccatcatgattaattcgccttacgaggatcgaaatgaacgacaatgatcgggtaatcaccagtcacctcattaataatgcgcttaatgagttcccagtcgcccccagcgaggccagcaccgattaaaggtgtgatgataggctttccagtcttaacggcgtcagcaagccctacagcctgtttaaaagcattgccgattgcgtcataatcgacacgcggcccaggtgtccagaaatcatattgagtatatgcattgaaaacaatgttgcctttttcgccaatgtaaacagaacaagttccgagcttatcacgggaaccttttaacgtattggcatcaacttgaaatgcaccaggaatacgatcgcggatttcgcgagcaataccagcgcccatattgcaatagcagttgcatccgtggatcaaatggccttcaccattcagatacatattgacagcattacctttcacttctttaatgatcatttttatttttccgatatagtagggccacaacaaggcccatcaaaatcacaaggatccacaatacagcgaattgaacccctacgctcattttctcgctttccgttcacggcggaggtcttcttgatgacacatatacattacaccagtaaagaccacaaggccaataacaacccagatgaaattacacatagtcatcatccccgcaataataacaaggcccagtgctctcatgcttaccagcattgtacgccaagaacaccacaaccgccgccataataataaaaatccagatagccattagtaaagtcctatgccagcattgaattcgtcaaccaaataagtacggaacttttcgcaccgttccttatttggcgcttgtttgcatagattcatcattggttcagactgcaaaaactctttttgtttcagcaacttaccgcgtttatacaggtgagcattttcctctccccacatataagcaacatctaactgttctgcgatcacttgcttacatactgcgacatctttgatatcgcgattgttgcataactcatccaggcgagcatcacccgcgtgagcaaatccagcaaccagagttaaaagcagtgctaactttttcatgatgattccttattcatcctcttcgataggggtataataatgcgcgttgcagatatacgcaagaacttttttcagagacatatcagagaatgtcggatcctgatttcgtctcatcccactaccagtttcaacagcccaacgtttgttagctggattgtatgtcagccagtagcaatcccattcagacagagtatgttcgaacagatcgaaacgcttgcgcccgtttgcttgcggtctaacaaaaggttcgaccatttctaaagcggttaaaactcgattaatgtttgaaccgtcttcatccatcgcgatccgcaaacagtattggttaatgtccggatccataccatcgatacccaggccgatagattcgaaaaattttgtagccgcgtgataagacacactagaagaacgatattccaacatcacagggatcttttccccgtccttgacgttgttaatgatatcctgatcgataagttcaatcaggtctcttttctccttgatcaaggtagaaatttcttcttgcagcggggctatcttcgcatgaagttcttttatccgttgatcaattacggacacttcgaaagctaaatttctcattgtacccattccccgtttttgtcaatatacatgatccaatcagcaaccgaccaatgggaagtattgcctttcggagtcgctacgaggtaggaaccagctttaaacagtacgcgtttagtttcgttcagaatcaggtcgctcataatgtattcctcatttaaccaaagtgaatcgatattcgattgcatcgttcgggcgctcatgcacagtatccgaacttgtgataacagtatacacggcttctttcacaagatccataattttctgtgagtttccccagacattgatactaaaatacaacccatttttaggaataggattgtattccatatcataatatatgtccataagttcacaaatgaacaagcggcgctgttcgttatcatatgtaaaataaatgttaaaacaatcgagagatttgctcaaagtaatctctttgataacgatgttatcttgtttgctaaaatgatcacggatcgcttgcacacaacgcagcaggttagggtaatcatatttttgtgaaacaatgacttgatgtgaaacgctcataatgtattcctctcaattagatgcatccataataaaaaagccccagaccgaagtcaagggctttttgtcaaatgatttgtttttcttctaacagcttcgcggttgtattaaccatacgagcataatcacgggcttctttctttgtatacttgaaaccagcattatagctcgccagcgcctttttcaagtcgcctttgtggtaatcaagccagtactccagttcatagatcgcatacttcgatccaccttgaagagtttctagctttttgattactacgcgtttaggatatgacttatccattcgtgcgctggcgctccttgcggtaacttgccagcatccataagcgtgatggccttttttacctttaccgacattctcacatgcgcgagactcgatccaggcaatagccgctaaatgatagcctaaacgtttagccttatctttttctacaggttttgcagtcttcaaatcatagttgtgtccaactcgataagcatactccagaacctctttctgcttcggtgtgatgttatccaaatccttgatataggatggagaatttttgtttgccagaggctttacagtagccttttgtaaaggcaattgatgagtaggcaaatccgcaatgaaatcccctagcggatccgttgcagcgttgccagaaaaagagcacaagaaaatgctggcagcaataataattttcttcattttaatacctatgttgcaaaaagaggggcaataatacaccccactttatatttatgcaactattttagatagtttttgcgtcacgtagtttatcggcgataaactcagcaatgttataatttgaaatagccttgttaggatcgtatagtgcaatgatttcatctaacgataccataacggcatgtttaaagtagacgctccagctagtagtaaggatctcgctgttgtcaaatccacagttagggctgaacaacgcgcggtatttgtacccactgtatttcgtcagacgattcgtgctgtgcgcatcgctggtgatcagaaaagttccctggtgagtttccacaacgaaaaagtatccgaggcgttctttgttgtccagcatcttttcaaacttgcgatcggtttcttcgcgaacaatacgagaagtcagcatttccaacactttatcgtattcgggccaatcattctcgatcacgatcgcatcaaatggtttcttaccattaatcccgcgcccgatttcgattttcgtgcaaatttcgttgaacgttttcaaatcttctggcgtcagttctttaagatcgctcaattttgctacataataacgtttttctagtttcattttacggaaacctcaattcaaaaataatttcacagagttaccacatttaggacatgtgataaattttttcacgacataatcagcagcagagaaaaatccattgtaaatcgcttctctcttttgctgtatatcagatagttcatactctaacccacttttacagcaactgcaaacagtaattagttttgggctatggatgacagtaatcatatacacctcacaaaaaagggggctttcgcccccatcattagaaattgtcttcgacaaacgccgcgagacgggaacgatacactgtatcaagaatgatatggcttgagtgttcgtattctttcagcttttcaacagcccatacaaacccgttgttaacggcagtgtttcgagggttgtcgatctgcttaatgttcccgcatagtatcagaagtgtgttctctccgcaacgagaaatgatagatttaatttcgtggttgctaaggttttgacattcatcaacaatcagcacagaacctttgcccggatccggatgtccgatactgcgaccacggaagtaatacaggctagggaattgcaccacccctttttcaatcaaaccttcaatgtatttttcagattccggattatccttaaacagaatgttcaggctagtaatacaaggttcgatagaaggccggagtttttcgcccaatgtaccaggaaggaagccgatttcacttgataacgggctatctgacttcacatacatcaagttagcgtaatgtccactattaaccaggtgcatagcaccggaaacagcaagcattgttttaccagaaccagcgccgcccataatggtagcaacatcgatttcattgctcataattgattcaacgaaagccgcttgcagagaatcacggggttggatagctttcatgagtttgcgtttcatagcctgttcatgcttaacaggtaagacattcaagcaaatctcatcagcagtcaccacacgcccgactaactcaccgtttgaggtaatgtactggttaggataaaaatcttcgtcaggaagcgaactgtaagtgatttgggctacattatccgtatatcccaacacttctacggtatcccagaaatcagggatctctacataaccggaatacaacacatcgctatcttttaacgtatcgtcgccagtatactgttctaccttacacccacgggacattgcgatcagcaacatcataatatcgcgagtaactaaggttgcatcctgttgcatacaagtttcaatgattcgttcgtcttgcttgtcaagagcaaacgttttgtttccgacataatcaaccactttaagggtgatagtgtcagacagtgctgggtttgtcaggtttaaaggaatacctgatttcgtaatcgcatcatatgactgaccgaaaataacttttgacagaagccggatcgccaatcgtgcttcgtgcgctgttcgttctttcgttttcaggtgatctaattcacccatagtagcagaggtaataatgatttctgtaccaggttgagtgaatgaatagattgaataggggttcgagactaaaacgttagtgtctaaaacatatttcatagaaaattcctgatttgattacggggtacgcggattcgcaccccgcgtactgcaatcacatacccagcgaaattacgtgaatatatgctaatgggtgtttcttttgtacacaatgcatgagtgtattatacacaatgtccatgcgttcattgcgcgtaagatcacactcatcaaaaataaggtttattgcctggtgctctattcgacgtccacggaaatgattaagaattgcccctttactggtcaatacatcacatccggtagcaccatttagctgtttggcgtcttgtgctgcatttaacgtatgcgctacgtaaatgttaagagaactatgggaacgtttcataaaatcaaacgcgcctttagtcttttgcgtttctctgcccagatccagcctggtttcgaataccataaaatcgttagggccgtaattatgcgttggttcttccaactctcgcataagatgcatcttacgacattcttcaattgtctttacataaaattcactattcatgttttacctttaaggggccaaagcccctttgttacgctaattccacatgcggggcatcaatgaattttgtttcgatcggaaggttcggatcatttttccagttgataccaaaacgcagtttaacacccagttcatcacctgcttgtttaacagcattcaggacaggcaaccacactttagggtttgtttgccagccttgaggcaacacgctaggatacagatccaccgcatcacccgtgatgtgttttgagttcattgtttgagatacacccttacggacgttctcgcgctgttgttctacagtacgcagaccttcacgtacaccaaaatcaacaggagacagttgcagagcacgttctacgactttcaccagttgaggtttaacgcctttaaggttgttaaggcttttttgactgaatttaaacataaaatcacctcttgtaaaaataccctgtttgggtacacagggtatttatggtttaagaggttcgataattaataatcgtaaagatcaccgaagcattcttcaaattcacgtttacgttcaatttgctcgtttctacgctctttcatatcaggaggaagacggttttcattgacttcatcaatgtaagcctgtgcatcctcttttgttagaaagaatgcatggaaattgtatccgttgtacccgttcatactacgatcttcaagagagaattctgtgtgacagtcccagtctttgtacagggtaatacatttagcaaacagcccaataccgcgatgaatgtatgggaatccagtaacaatcatcttgctacccatttccgcattttctccgttcacacagaatacttcatacataatcgcacctggtttaacatctttcttaacagcacgtttttcaaaagcacttttcataatatattcctctcaattggtgtaactacatactactagtttattttctggatgtcaacaaggtttatcgtttttagacggaaaagttagagtgaacaaacgatcatgaaggttgtcgatccgttcacaagcctgtttcagtatggttttatcaccatcatttgttgtttcaatgcatccaagttcatcggtgtcaatgttcactacatcgctcatcaatgaagcaaacacgttaacatcaggatgtaacagttcttcgatttcggccttcatgccgtcgtgttcagaaaggatatcaataatatcacgggttaaatctccctggtacgggaaccctgtttctaaatgattgatgatcctttgtgctttcgtaatcataattttacctacaaaaaagcccctttcggggctagttaattagagttcacagcaacgacacacaccgtattttgtaaatggagcatcaccgctaacgtaggcccagaaatcacatgcttcttcggcagtatcgaagattgcagcatcatagaacccgtgggcttcgttaccgttctcatcgatgaaaaccggagtccagatattaggattgaagcaatcgtcaacaacaacccaaccttctttagctttcattgcttctttgttggcttcgatgtgagctaagatttcgttcatgatgtccatttttctctcctaaagtgtgtttcgtttcgacagggctatagtctcataaccccgtatctacgtcaacacttatttgaagcgaattgtgctatttttgaaaaatagtccagagcacacagcaccttcaattttcacccctgtagggcttttagcaacgaaccctgttgcgtaggtgtctttctcatcacatgcgaaccaggcgtggcctgtgtacgtgatatcgctaaacccgttagcagtcagaatacgttcggcttctttctcatcggtgcatccggattgtgctaaaacgacaataacgactaacaccaaagcaataatatatttcatgttaaactctttttaagttggttttactggcttcaatccagtacacgggatcagaatagttaccacacatacccagtaacacagttgtacatcctaaatgatcggaaggtctcaatccatcaggatgaaaaggcaattcgttaacaccgatactggtagcaaaaagagcacctccagtactgtaaaatgttttgatatgatcgtatgcatcatcaggccactgaaaacgataagttttattgtcaatggttactgtatacatatcatattccgtaaacaacggatcttttccttgtgttgccccatacagagcgccgcgccattcaaccagatttgcttcaatgtcgcttacacaaatttcgttacccatacgcaaatcatgaaggatcccttcaatggtacgaatagccccactaagttcattagttaacatagagtttcctttaaatcggtttaatggttttcaggtgtagtttagcataagaagaaccaaatgagttaccattatgatcaaacttatgttcttcactcttccagtatttccccgatttcatcaagggtatacgcttcttacctgctgttatcgtttcaaccattccggtatgagtgaatgtcatgatataccctcttctttcagcacttcccagatcagcttatccatgtgcatgagattccacataacggaatcatgagaacccagagatcgagagtagatcactccccatgaacgatacgccttttggaattctgctgcattggttgcatcatacggcatatcatcaccagaagcaatcaacagtttaagaatcattaaactgttcagcaattttgcactgggatcttgtgcctgtattttcgagcagtaattttcaatgattgcttttacctttggttcggtaatacgagctttttcgcaacgttctctgtacacgtacatcagttcatcgattatttcttgcatataacgcctcccgttctactgctgataacccgcgaatgtagttctgtgattctctatgcgcatctgctacagcgcgtcctgctcgttccgacgccagtatataagtaacaacttcattacgaatgtgccataggtaatccatcattacaagatcttcttctgtatgaaaacctttaatgtcacactcgcagcaaatagcgtctctttccgatagtgccagttgcgcggattgcgcgttgattggcatcatactgtacttgtcgatcaaactatccaacgttcgcggtttcacaataccaactgttacaggaacaggacgaagagtaggtttatccgaataaatcatagtattcctcttcatcaagtctagatgtcagtttagcgataaagtcgaaaatgtgttgtgaaccatcttcaacataatgacggtatgcaagcaaagttgatacgtgacacatatcgaccgattcaactttgatgcttgatgcgatcattgtatcatcatttccatatccgtcaatatcacggagtaccatttcttcagtcgggaaacgctgaaggagtgacgcttcccgatccgataccagagcaactaagcgattatgtcgcgtgttgtacgataatattttcatttcaattccaccgcgtaaacatcaggttcaggggctttgtgtacgcgcatatctttaccgcataccgcataagccggacagttacgacaaccgttatgatccttattaccgatcagttcattacggaactgtttggttttcggatgttcccagatatccttaatgaaatcgttcgcttccaggacattcaaaccttcttcccaaccaccttcaacccagcgttcggtaaacgaacaagggaagaactcgcctttctcgttaatgtacgagctaaacatagttgcttcgcaatcttcggcatattgcttgtactgttcgaagtttgggtgtccttccatcgcttcaacgaaagcgggggctgaacagctatcgaatccaaatcctacaccagaatcgaggcaatattcaacaagctttttatattgttcgcgggtaacggtgtcccagttcttaccgcgtcctttttgtttcagtcccaggaacacgatcgcgttaacttgtttcaagcgcggatcattctttacagcatcaaccacgttaaacgcgtcatcataggttttagagctaaccatgaaatgaaggttgatttgctgttgtccggcttctgcaagattagccactgaattaaacgctacatcgaatccagcatgtttgtatactgataccgcaacagccccagcaacagccgctaaacgcgctgcaacgtcttttgatacatcagcaatggtaaggtttggtacaatgcctttagaacgcgcataggccatcatatcaaacatatcagggtttgtttgtccctgtgcatcagcaccgagggcgcattgtgttaaccagggcattttatcaatgatagatttgaatgtatcaagatccatattgaagccgttagggttattggacttgtagcagaacccgcagagtttacccgctggcccgttgcatttggtagtgatctcgatatcgagaatttcggggaatggggcataggtaggatcagtttcgaacgatgttccccagcgagcaaactcaccagttttaacgttgaaattgtagttataccacttagagcgagcgtaacggatatcaccatcttgatagatgaacagggtaggagctttcagaacagtttgtgcgttattcataatataattctcaaaatctaacatgggattggaagacagcgcgagcgagactttcattatcaaacggtattgattggtgttgccctttgctatcaatgttaacgcgccaaaattcactagaacaattttcagtggagtaatgcatcagcgttaccgttttattcttttccaggaaggtgcgtttgtcaatctctgttttgagttcgtgttgcatcattttacactccgtttcagtttacgttcgtcagccagttcttttttgtacagtttaatgtacttcccgttaaggatgcgaagctgttggaaaactttgttgcacaaagcacgtttcgctttgtattccggtgtattgcggattgattcgatcgtcatccccatttcatttttagggtacgcgctcaactccctgccgatctctctgtgccagttgcttaactgatcacgctgtgctttgtactcttcaaaagttaacataacaatctccggtttcgtttctatgtgtgtaaggtatcattaccctacacacaacgcaagcgattttattttccgtaaagaacacaatattctttatatttttcacgggctttttcttcattactaaaggaaactcccgttccaaaatcagaaccttcgaacgtaacatcccacgattcatacccatcttccgaataataggaaagtgttattttacgatcttcaagaacaagttgttcaacaacaatatcaatttcagtagtcatagttcatttccataatcttttgctgcatcttcgggggttgcgtccagtcggtaaagctcaacggctaatggactgggtttgatttcgcggttcaggatctcgctgataccgcgaaggaattcgatataaggacggaatctcatttgatacgtaccgcgttaaaagcctggttgcgcagttcataagcctgttcaagctgttcagtagtgaacagaggactatcagtgttagtggtgaaactgcaaatggttttgttgtcggcgttgacttcttcgacaacgatttcgtaaccccagatcccgctgtactcacatttcacgttccggtacttgatgtaaaccgcagcaacatcttcttttttgtagttccggcttttgtagataatttccatgatatcctccttcgtttcgatgtgtgtacaataacagattggggttatagagttttagcaatttgtgctaattatgccattttcttagcgattttccaggaggctttgaacgccggaacatcttcaatatcaacccagaaaccagatccgaaaccatcactatagcaagggcaaccgtcgcagtagttttcccaggtcatcacttcaccaccaacagaagcaccagtttccatagcacgtaatgcatcttcaaccttttccagtttttcggcgttgtcgtcgtaaatgacaaagtaccatttacctttgtattcgttaccaagtttgatagcttcgcgaacaagtttcatgatgatttcctttttgtctgtttcgtttctatgtgtgtaatataacaaaaccccttgccattggcaaggggtttttgcaaaaattatcgtttgattggggtattatctataacccgttgaatttccgaacgcatcgtagaatactggcacaattcggtaagcgcccgatccaggtgcatcatagcgtaagaaaactcttttccgcatttgtcgcatctagcgtataaatgtaaatgaattcgcccgatcccatctacctgactatatttctggaatatgtaaggatctgcacctcgatagccagtagcttcgtgcttacactctcgtttgaaccatgacattaataatatccttgtacgttgaaccggtcacacaacaatttttttgtttggttggtatcgttttggatagaatgcaacatagcggtaatcatgtttaggttattttgcatcatttccgcgctcatgagaacttccatacgcgcacgtaagcgtttattttcttcttccaactcaaccatacggtcatatgctttgattcgctctaagggcatatcaggacgctctttgagtacgcgagcacgttcaacctcacaagcatgatttgctttccagtggttcgattccgcttcaaatttattaaggcggcggatctcttcaaccagctttttgatcatgtgtggatccatcatgtcgatgaatttcatcaagcaattggattttgtttggttgtcagcaacagaccaagacgaattatacgtaaccgtaaacgtgcggcccatttcatcaacaaccccgatcttgttatcatcggtgattgtagccgcccatttctccctcatggctgtacaggttccgctggcgacactatgcaacttgtttaatgttgcgtcatcaaacacaatttcatcactcatgtatgcctcacatagatttcaaaatacgcagaagtgcgttagtaaagatatcaggaacacaaccaccaaacaacttatgattcatcagcgctaatttcatgctgtgattttcagtatatcgcccgttatggatcccccaggcaacgacattaccaggttcatgaataactaagttagtgagagtaacggtcatgcgctctttatcattgatagagaatgaatagcgataaccggatccgatgtcgccgtaaaggttaaggtctttcaatttcccttgctcatgcaagcgtttcatatgaactgcacatgcatgattaatagtcatttcgtcatccctagcccagtcatcaataccagaggtataacgaatattgaagtagttagtcagttcatttgatacgctcattagaaacctcacttttataaaattctttaccagacccattacagctactgcatttgggggaacggttgttatcataccgccccgaaccgttacatgcaacacatttccttaatttccagccatacacgaacctcatgtaataatcggttcgtgcggccttgcgttcatggaaattcatgctttgtaaacctgaaccaaccacatttcgatgttaggcgcgtaagtaacgtttaccttatgcatagtgcggtatttgtaagcggctttgtacgcatcgagttcagtcggaacacagaaagaaaaaccgttatcatagcgttctgcgttagaaacttcacaaccaactacagcggcaatgtttttattcatgttcatgatgttttcctttctctgtttcgtttcgatgtgtgtaatataacaaagcccctgcacgaatgcaagggcttttttcagtttttcaacatccaaagttgcggaggacaatctttagaagcgattagacgatccaggcgggacataacccgacgataaccgtcgtattcaaaattaatttttggtggaacgtagttgacctggattgtttttctgttagctaaagaaacatactcagggatcaccgttcgcaaccgtatagcgatcactggcttctcttcgccttcgttaaagaacatttgaacagttataggacaagcaaagattttaccatttacccgacgataaacaataacttcctgtgtcccttctgttttggccttcaccgcgtaggttagaacataacacgaataatgatttgctagactcatcatgatatcgcgataagtttcaatatcttttttaatcgatactgaacggtctttaaagcgatctgcaatgtggtcagcagtagccgctaccttgattgtataccagtcacctaacgcgctagtaaacgcctcgctaacttcttttcgtacactgttaacaagatacattaaacgtgttctgttcatataatcctcactgatttttgaagtattcgatctgacgcaaacgcttttcagcggcggctttcgaatcgtattcaccaagttcttttgtgcgatcgtgattcaaaacaacccacttatcgccacgctgttcaatgtgttctgtaatatcttttaacgacttatccagatccagtgattcagcctcttcacagataatagtcaaatccacgggcagtgtcaacaaccttttcactccgctgatatcatcaagcatcgaatcgtatgcaagggttacgtgcggcttgtaatccggataatcgtatgttgcgccagcatcaatagaatctttgaaacggctatgcaggtattcagattccaggatccctacaatagtgctaccgtattttgtgtcccacttttcaacatcaaccagtttagcaggttctgtgatgtcctgttgcgggaacaaatcaaccgttttccggctgtatacgatcgttgtatgcatcttttcggctgaaacagcattctttgtgatacctaatgtcttttgaacatttttcaaagcctcacatgaagcctgatcgaatttagcacacatgtagataccaggatctacaacaggttttgtgatttcaagaaatgatttcataaaacaccccaataaaaaaggggccgaagcccctttgtaataaatttgtttttacgcttcttcgccaaaggcggcttcatcttccgcgactttttcgacttcaacggaagggatcagagcggataccgcgccaatcactgcttctggggttactggctggcttgcgtcaatacccagtaccgaacacaggtcggacagaagttgacgatgaaccgacagttcactttctttttgcgcgataacttcgttaagatcgaatgcgcggcctttcagtaccagtacttcattttgcagtttttgaatatcagacattttattacccattgttaaaatttaaaagtatcgagcactttgctctttagttgtttcaaagtaccttcgttagtgatgatactatctccaggttgaggtgtcaaacctttttccgtggaatgttcatcaacaattccggtatcctttacaataaacacaaacttagcacccaagcgtttcaggtatttatattcgtgttcctgacgacagtcagttaccagaagatgattgtattcgtcaccagcatatttattgacgaatctttccagtgtgtaacgaacccaaaccgtgttatcatacttgcatacgatatcagttccaaacacttgcatcaagcgtctgatactccagggagtatcgttactcataatcagattatcaatatcatcaggactataaacaatattgtatccacgttctttgaggatttcaagcccgattttgaaaatatttagaacatcttcattagacatcacaagaggtttctctcgatcaccttcgtaaaaaatagcatccggatcagaatattgtccttcaatcatattgcgaatgtatggtttatcgtaaccatatcgctgcattgctattcttagcgttcttttgataccaaatgccagtgcttcacactgaacatcattgtacgcctcttgaataaatttagcaaccgtatctttaccagttcgcttttttccactaatcacataaatcattagctcattctcttttgagaagtgactacttttccgtcaatttcaacttccatatgaaggaagccaaaagttgccatacacgtaaccgcttcatcactatcgttagtataacccaattcaacctcacccaagtttgttgggaaggcaccataaaatctaaatgtggcgatcgttttcatctgggagttatccaggatatgcacagcgaatgattgcttaggatcatcccacgcaacagagttaaactcgttgtaatcgtttgtgctcaacatccatatgtaaatcccaagatacgatctcatttcctcatcgactacaaagcggatcatcaaaggatcaaactcaaaagccgaaccaggtactttacctcgaaccatcatatttgcaggaatatcaactgctgggaggttcattgatggtagtgtaaccccttgaacttgtaaagtcaaacctttcatgtaactgttatcaggaatatcaacccgaaagtttgtaggtgagatttggtttaaaatcatttctgtagacataggatctcctttcctctatttagcggggaacgggatcaaagcggcctgacggggtaatataaaaatttgaagaaaatgcttgaccttttaaaatctttgatctataataattattaattaaaattttatcaaaaagatctaacaagatcaagtaaaatttaataaataatttatcaaaaatttttagatctgatcttgaattcataaattttatgatctataatatattaatattttattttatcataaatttttatgaagatcaatacttagatctaataaattttatgctttttctgaaaacttttcctttaccccgtcactaaatactggtactatgttcccatattggaaatcaggaaaaacaaaatgactcacttgaaaaaattcaaagaatttctgaccgaaggtaaaaccctcgctcgtaccgtagcacgtggtcaacgcgctaaaacttccgataaacattcaatcggttttcttcacttcaaacatggttctgatttcgaagttttagcaccggattctcacgatctggcatacttcggtaaaaacattgtacgtttgaaaggtatgactactggtaaagttcaagcggcttatgtcgattgggctaaaggtactgtttctttctacagtggcaatccggatgatgatctggatttcgacaaaccagaaaaattcaaagctgctactctgtatgaagaggcggaagaaaatctggatctgtataaccagttagcagaagatttcgaaatcgagatccctatggatgaagctctggtgaaaggtaaagtttacaaactcccaagcaacgatatgcgtcttctgtacactgggcgttctaaaactaaagcaagcggtgaatatgcagtgtttaccgtagttgatgcttccggcaaacctcgcctagtatctggtaaaaaattcacccaagaatataaaggcgatatggtttctaaactggttctggctgaatccgaagatctgaatgaagcggctaaaggcattcgcgaaaaagttattgctgtgatggtgaaacgcgggtttaacgaaaaagatgcagaaaagatggttgacaaaaacctgaaagatgctatgaaagttagacctggtgcgacccctggcaaacttgcagaaatagttagcaccctgtaaaaataaagccccttcctttcggttggggctttttgattagtatttgctccagactttttttgcgccgtaaggtttccctttggacataaattgctgagtcggtagccaaacagctttcgcccaatctttaggggcaatctctgctaatggtgatttgaggtgtgatggtagatatgctttgatcatttctgttgcgcctcgcatacctttcacgttaccccagttaattttgagtacagtcttgttagagaggcgtttagtggatccgtaccctcgcttcaataactcttctaaaaactcctgtcgtgctctgggtggcgcatagtgcaagttcaaaccatagaacactaagttacccgctttcgatcttccggatcctaagaaaatgatcagtggaaatctatcccaataaggcagggtgtctttatattttgcatcatatgcaaacgtgtacaggcgacccgttgctggttttgccacacggtgtgttttgatactggttttgatgaaattaccaaaccattctgttgaatctttctgtcgctttgctgctgatacaccaacagtgatctttttcagactattacggaaatcgttgatgatctcgatcccgtgttttttacggtagtcattacgttttttacgggcttctgtctctgcggaacgtcgttcaatctcatcatcgatctgttttttgtaacgatgcattgactttgtgaacgttgcgtagtttaatccctcagaatcggcaaaacgtttagcagaaacacctttcgtttttgccttgcggaatttgatccccagttcaacccaatcactcaatttgcgtttgggtggtgcttttggtttatcctcttccgcgatgatctcaaactcaaaaataaaactcatgtttccctccagggattactgacctcgccacccaaaaacttttttgagtgattcttctgttacgattttgaactgccagcctttttgacggcatagctcatttgcggctttccacttatcaatattaactgtataggtgtaaagagcatcaataaatttctttttattgtgtacgttgttgtttactggcttcggtgggggcatggtttctttaaggggtttaacctcccaaagatatgtagtaccattttccatttccacatagaaatccatgtaatagcgtcttctcttaccgtctgcattgcagaaatacgggatcactatacattcagaattccaacgttttacgtgtgggtttttatccagccacttcataacgtagcgctcccacgatgacctatacgtaatctttcgcggatcgcctttatacttctgtatgttttcgggtacaaacgaccctttatacgtctgtcttccagccattgcgtaaatcctaaatagaataatataacgtttagataggggaacttatcgtgctattttcatacttcccgcctgttgattacaaaggcacccagacaactgatattttccgagactatcgattttattttaatcgtgtgattggaaaatataaaacccgtagttaccagataacaggcacactacgacctgaacaacttgcagaatcattatatggaaaccagcaatactactggatcctgttgatgcttaactctgtttatgaccctttctatggttggatctccgatcaggaagccgcgtatcagtgcgctatacagcgttattctgaggttggcggtgaacaggttctgtatcatgtagatgaaaacaacaacaagtattataaccttgtcgaagaccccaataaccctggtcattggtatgacaaaggtgacaaaccaatgctgtatttacagtatcaaggtgtattagctcctgtagatatttatgaagatgcagtgttgcaaaatgaagcaaaacgaacaataaaaatcattagtccgtctgacatccaggcgtttctgaatgattttattaaagaaatggaaaaggctaactcatgaaattaggcggaaatttacactcccctttctttgatggggtggttgaaaacgttgatgatccgcgcgggttgggccgtgttcaagtccgtgtatttggacaacacccagcccaaaaacaaaaatccgatgcgatcggtgttcctgttgaagatttaccctggatgatgcctattcaggatattagaagcgctgcgatctctggtgtgggcttctctccaactggtatcactcgcggatcctttgttgttggttattggcgtgacaaatggcaccaagatggtatgataatcggtactgtcgctggtgaatatgtcgaacaaccagacacacagaaaggtttttgcgatcctatgggtgaataccctcgctatgttggtaacgatgttaactcccttgctttaggtggtttgaaaggcaaaggatcatcaagtgtcatcattcgtgattcaaacacaagcatagcagtaaacccagacgatcgcccactggatgagataccagaagataaccgccctgatacgggtggatttacgatcgaaaagatgctcaagcaggatgaggggatccgcacacgctggtatacagacagtgaaggatatccgacaattgggatcgggcatttgcttatccgcgaaaagactcgcgacactgcaaaaattaacgctgcgatcagtaaagcggtaggtcgagaagtaacaaacgggacaatcacggcagaagaggtttcaaccttatttgctcaagatttagccaaagtaagatctgatattcagagaaccgctaacgtccgtgaagtgtatgtgaacctaaaccgtcctcgtcaaatggcgatcgaaaacatgtcgtttcaaatgggcgtcggtggtgttgctaaattcaccaataccctaaaagcgatgaaaaatgaagattggcaagcggcttataatggtcttcgcaattcactgtgggctagtcaaactccaggccgttcttctcgcgtgtctaaaatcgtcctcacgggcaaccttgaatcatatggggtgcaagtaccagatccggaagggcgctctctgagtgctgcttacgctgcgtataacggtgctacattgtcggctactagtccggaagatccgtttactcctggtgatacccgtgtgatgtttgaagaaccagcatcatcttataatgcggaatatccgtataacatggtgtttgaatcgagatccggacacattcaggaattcgatgataccccaggatacgaacgatataaccgtgttcacccagcagggagttacgaagaaattcgcccggatggaacccgcgttgttaaaatcgtaggggatgattatcaaattgtgatgcagggccggaaactcaatgttaaaggcaacttgcaggtagttattgaaggcgacgcattcatttacaacatgggtaacgttcaacaaacggttgatggtaacgtaactgagtttgttcgtggcaacgttcaacaaactgttgaaggtgagtacgttggcctgattaaaggtaacgctgaactaactgtaaacaaagatgcaacagttaacgttgatcagaatcttaccgcaaatgtgaaacagaatgcaaccgtagctgtaacagaagacgcaacgatcactgcaaaaaatgcgaaaatggagattgaagaaacgatggatatcggtgctaaagatatcaatatcaaagcaacgaataacacgtttattgattctggcgcattaacaaaaatcactggcggcaccgtccaagtggggtaattaaatgattatggattatgaatcaataattgatggaattatgcaaaattatcagcatccttgtgatgctgagatccccgctggctattatcggcgggttatctggcaagggcatacagaaaattatccggctgttggggttgagtgggataccgagataatcaaaatcggtactcatctttatactcaagaaccgttcggacatagaagcacggatctacctgttgtcaattcaccgggaacagatccaaataccggacaaccaacagggatccttgttccgaagattggctattatttcaacactcaagcagagattgatgcttacattacatccatcggtgcaactaaaatcaatggtggtaatgattggtacggcgcggatctgtcaaaatcaaacctatacaaaaaccctggcgaactggctatgtataaggttgaaaacagtggcgggtatctttccggaacaaaccctgtatgtgatgctcgcatacgtcaggcgtataatcaggacactggcgcattcaccaatattgattattattggaatggtaatcgtatagcatatatgaagcatgacgaaacaggggcgcaccagtgcaaatatacgggtatgcaggttaacaccaacgcagatacaagcattcctcctgttcctcctgcaatgccttccacttatggagcattaccgagtgaattaagccgtgctgatatttcgtgcattccggcaactgttggtttcgcatatacaaatatcagtgatgctatgttacaggcatggaacgaaacccgtaatacgttcaagctacagtttaacatgttaacgggtgctgtacagaatggattcgggatcgcgacgatgtttgatggtttatccgtatcgatggaagaagtaatggcgggggcgctcgcattgtcacagcaagcatggcaaactgctatgaaagttttcagacaagtgattagcgctgcgtttaacattatcggtggtgcatggggattgattaatcagttcttgcctcaagtaaccatcttaggtgttgcgatcaacatttacgatctggtgtttggtgataattctgttcagactttgaaagatgcatttaatgcaatcatcaaatccggacaacaaacatatgaaaccgtcataaacgcaatatacggggccataggaagcgcatacaattactctgtggaatatgtcaaagctggcgctcgcgaccttgtggatgcgtgtagcgcgttatttgattggtgtttaacgatgttccaaaacggttgcgttgcattaatcgacttatacggtcggatcatgcaaacatgggctatccctccggaagttccaaacccgttatggtctgcggtgctggctatccgtaacatcatgatgcaaatcaaaccacttgatataattctgggcggtaacttccctggatttactgcaatggatttatatcaacaagcacaggaaaaagtcaaggcttttgttgatgagtcatacgaacagatccgagggctttatgaacaagggcaggaactttacaaaacgttaaaaaatcagattttcgaacgtgatgcaattcagagaaaattcaaccagtacttaaactggatgtggggcgctgtaacagacgaagcaacagcggcttatcaatctgcattggatgttgcaaacgctgctgtagctgcaacacaggccgcgtatgacgctatacaggaacagattggatctctacaagatgcaatgaaagatacatacagtatggcgatggaagaattaaagaaattgcctttgatgagtacaataaacgagtttttaggcttctgtggtgtcgcatttgacgatcttctcaagtcatatgaaaatgcgattactggtgctcagtctctgtacaaaaatttcattgatagttcgcgctcgtttaaagatcactgcaaagtaatctacaaccaaatttgtacgctggcgttgagtaaagtcacacaatatgtgaataaattgctgtctctcataggattagcaatcaactttggttcgattagtgtatgtgttccagtactgaaatactaaatagtcgaatgatcaagaggaatttataataatggctactgctaagactaagactgtcaaaaaacagattaaccaaatccccgatatttttatcgggggtactttcgaagaaattaaaacagatctgatcgattggctgggtggacaagaagagtttaaggattacgatttttccggctcacgaatgaacgtactgatcgaccttctgtcgtatgctactctttatattcagcagatgggtaacacggctctatttgaatcgtttattcgcacggctgcattgcgtagttctgttgtacagtctgctcaagaactggggtatatgccagattcgcgcacggctgcaagcacagcagtaatgattacggctgctaacccactgaccccaacatcgatccgtatcccgcgcggtacaaaattcatcggtactgtaaagaatacagacagttattcttttgttgtatcggatgacgttgttatcgttcgtgatagtaataacaactatacatcaatgctgaacctggtgcaaggccgtttagttcgtactgaactaatttatgacggttcaagtatcctgatccgagatccaaacattgaccgtagtcaggtacgtttaactgtaaacggcgcacaatgggaagactggacaaacgaaagcattgtaaacgcaacaggcgcaagcacgatttactacatgcgtgaaactgttgatggacataccgaagtttatttcggtgaaggtgaagcaagtcaacaagtggcgggtggtgcattaaccgctgaatatatcgggggcttgaaacctgctaatggatcgactatcgttattgaatacctgtcaaccgatggggaagcggctaacggtgcaaaagattttatctatgtcgatacattaaccaatattagcatcactaacatcgaagaaaacccgactaaatcccctgattatgtcggtgctgatggtggtggtgatccagaagatatcgagcgtattcgagaactggcccctgttatgcgtgaaacacaacgccgttgtgtaactgcatcggattatgaatctttcctgtctcacagatttggttctatcatccaggcggtacagtgctttactgataacgaaaaacccggttatgctttcatttctgttaaaccaaagtcaggtttgcgcctaacatcggtacagaaagaagatatgcaaacgtatctttcgaaatataacctcgcgacgatcaccccgtcgattatggatcctaactatctgtatattgtgcaatctgtaaaagtaacgtatgatatcagtaagttgacggaatcagaggaatggttacgcggtcaggttatttcgtcgatcgactcttactatactgacaacgttgaaattttcaacaaatctttcagtgtatctaagatgttgacttatgtcgatcagtctgatacttctattatcggttcggaagcagatattaaattgctccgtgaaattgacaactattacagcgcccctatgtctgggatccatttcttgaaccaggtggaatctaaatcaatcatttccagtacgttcaagttcaccaacgaagaagacgaaagttatgatgttcgttatgcttctacggaaatggatcaggatggtaacgcaaaaattgtaataggcccgttcaaggatggggatatttcgatcgctgcttatacaggtgatgactttgaaaaattaacagatgcaggaacccgtaataaatattacgaagtcggatcggtgtctcattataccgatttcattagctttgatctgggcgttctgaacgtatccgccgatagtttcagtgctgcttatatcgagctaaccgcaaagcctctcgaagaaaccatttttactcgcgatggatcgttgatcgtgtttgaaaatgacctgcgtcctcaatacaccacattgactatgaatcctatcagtcaataatcgttaacccctgtcttcggataggggtttttctttttataaatacgtgatatacataaccgcaaatttggagaaatataatgattaaagcgccttcgattacgagtttgcgcgttgataagctggctgctaacttcgtttaccttaaatgggatgatgttggcatggatttctattatgtggttgaatttgcccgtagccgtgatatggacggaactattattccagacgaagagttaatctggacgcagttgggttatagctacgaaaacgaatggtttagcgatcaggttgccccaaatacacgttataaattccgtattcaaacaactcatgaagggtttgacccttctgattgggtgatcagcgatgaattatggacgtttgatgagaacgcctacgcatatacaaccatgcgtgaattcacccctgctgattcgtttatcaatgaaaaattcgcaaaaaacaatcgtgattacgtcgattttaacgatgatgttattatggcttctctgatggttgaggattttgtatactctcccctgtattctgatgtaagccagatcagcgataagatcctgaaacaagaaagctaccatgaaattcaagatcacatcgaacacgtttgtaatgatatagatcgcacgttcctggtatactcaaacggattgctttacctgtttgaacgttttcagaatatggctaaagtgtcaaatgacaaaggccaaacgtggtattactacaaagcattaaacgatcgtgtaggcaatccggtttcccgtaccgtttcttatcagagcactaacactacgtatgtgttaggatacgatcgcatattttacgggcgcacgtcaacagatattcgttggtcttctgatgaagttcgtttttcttctgatgatgtaacgtttgcgaagctggggaaccagtcagggttagattttgatgttgattcatacaacacatatgcgcgtctaccgggaggagtgtcgaagtatgccgaagctatagcttgttctaatgaatggctctacgtggctgctaagaacgttatgcgccgtattgcgttacgtaacacaccaattgatactgatcctggttcgccgacctttggtgaacgtatttttgatgaagtttcatataccatcgtaccaggaaatgataaaattgttgttaaaaaaatggacgtgctgaatgaccgtctatacgttctggtaactggtgaagttaaaacggcgatgatggatccgactgtcaaggctaacgtgatcccatcaaacgatgctggcgtttatctgtgggatgagaatgcaaagacgtttacccgtgtttatggtaaaaccgaagatgaacgtttttatatcactcatgaatataccaatatgtcaaccaatggcgatgaagtttacatttctgttggtaactacaaatatccaggcactttgccagatccagatctggttgaaaagtatccggaagatgtgcattcagcggtgaaatacgatcttgttactggttatactgcgagcatttcgattaactttgctacagttcgtgcaaatcagaacgatcctacagtatggaactttgggccgcaagagtactacaatgaagcaaactttagctggcatttccgcgataaggttagcacatggatcaccaatgataaccgtcctctggtggtttatccggaaaccctgtatactctggttactgatagcgcgtctcctgcgtcaacgattcgtgtaaaccatgaagtttgggacaaaggaacagttactatctacttgaataatatcaagtttactggttttacgaagtacacaaacggtgttctgttgtatcgctcaggtggtaggataattggattctatgaactgtcataccgcgcaagggatgaactcactattttctggaaacccgataacactttaatggtggcaagtctggttaatcaggaacgtgaaaacccatatacgccggatattgaacctggattaatcgaccctgatctgagtcacatgatcactcgttttgctccgcaaagctatctggacaaccaacagttcgaaaaatttggtgaatactatctgcaatacatttcgttgggaagcaacagttactataacaaattgctgaacctcatccggaacaagtatccgagagagaaaaacaacgtcgaatatttgtggtctgaaattaaccgccgtaacatttacctggataaaaccaaacgtgaggcagtggttagatttttcgaatcacgtgcaagcgatttctattcaacaaaagggattgaggcaagttatacgttcctgtttaaattgctgtataacgaagatgtttccgttgagatcgaaagctccaacagtctcgaatatgatattttggttagttcaacaaatatcagtcaggatatcgtaggccggacgatctatacaccaactggacgcgctaacgttacgtacatcgaacgtgaatatgaaaatggtcaattgcgttggtcaatgactctgcataatgctcaaggtaactttatcgaagggcaggttgtcaagtcagaaaaaaccaatttcaccggaatggtaattcgtggtgttcgcggtaaacaaatggctaacaactcgatcgactatatcaaccgtggacgatcttactatgtgatgaaaattcgttcaaatctaccgacttcccgttataaggatgacgtattgaggtttgttcatccggtaggatttggctttatgggtatcacgatgttaacagtattcatcaactctggtttgtcaatgactcataacgagacaatcattgatattctgagaaactaccgtttcgatagtggttatcctaagttctggcctgatcgcattgcgagtatggacggtaacggaaaccaacaattcgacctggttactggtgaacctctgtacaccgtacacccgcgagcgggggaaccttttgatgtacctccggaatatgacattgaagaaaaaccgcttaacggtgttcttccttctgcgcgacggttcgatcaaagtccgttgttcgattgctcaggcgttaaatattcacagttccgtaatttggtggataaacgactgaaagatgatgcaggaaacccacgtgatccaaatcctccatcacagattaaggtaggaaattaaatggcacaacaaaacttgtatcggtcggtaattactgcaaaattccgaaccgaaaacttgatgaacttcaaagatatgatcggcgatgccgccgatctaaacacgatttacatgtctattggacgaactgaatcgtggtcggataacgaatccgaccctaacttcgcccctccatatccaaatgatagcaccgatggtgttagtgatatgtggacgcatatgatcggggctactaaagttcctggtgatatgatagatgcaattttaccacgtaaagactggggtgatactcgctatccaaacccgaaaatcttttactttaacgatattgttgttgtaaacaccgcgccttataaccgtactgatccgggtaaaggttggatggtttatcgtgtagttgatgttcctgatatcggttcttgctccatttcgagcattaccggaaaacttgaatgtatcaggatcggcggtatctggagtccgtctcatgaatctagtgaacctccacgcggagaagctaacgggatcgacatgggagacggttataaatgggaatacctctacacaatcccgccagatgtcgtgatcaaccgctgtacaaatgaacatatcgtagttcctttccctggcgaactggaagaggatccggtacgttggggttatgataacgtgattcaatggtatccaggacaatacgatctagtgtatcggttgaaggtgaattcaatgcgttttcgtgcatacatggattctcttttcttcccgcaatctacgcttcctggtaacaaagggttccgtcagataagtattattgtaaacccgttgattaaaaaggcaagcccgaccgagcctgaaaagaaagcaactggtgattactataatgctaacgcgcttgaacctgattccggacgtatgatttacatggaaaacagacaacctattattcgctcccttgatcagactgaggaagtgagtattgtattcgaattctaaggaaaaccaatggcttaccaaacagcaaaaaaactaattgatgtcggtgaaatcggcaacccatcaacaggcgatccgctttatgatggtggtgttaaactgaacgaaatgatcaccaacgtttataatgcgtttggtgatgtgcgtatgctgtctgcaaacgaaggtgtcggtaacatggtgatccatgctaccggatactatcagaaattaccacgcacttactattcaagtacaccgatcgaactgggttccctgcatgacatagatacttcaacaggttcgattaccgttgttcttccttctggtaaggttggcgaaggttgctacttcataaatagtacgggtagtgtctctgttgatcgtcctatcgcgtttcgtcctcaagttggcgatacaatcgcgggggttgcagaccagttgtacatcacgtcaccttacacctttgtaaaaatctggtgtaccaaaaaagaaggtgcgatcacaacatgggattattctgtagaatctatgttcggttctaaaacgatgcctgttgacactacggcgcttgtactgaaagcaaacccgactgctattcctatgttcggatatagcgaatttagcggggctaaggtgcttgtatacgcagaaaacttagctggtacagttaccaaaatggcagaagttttaatgaccgtggatcgtgtacacaaaacgatttattcaacggaatacgctattttgaaaaacagtgaagatgaaatgtttacattaaactttactgtcggtgctggtgatgtcgtatacgctaacgtgcaagcgatcaaagaagatcgaattaaattcacgattaaagcaatcgatacgattaaatcagggatcgcgtcatgaaacaagaaattttaataggtcaggttgtagacgatggtacaggcgattacctgcgtcgaggtggtcaaaagactaacaacaactttacagaattgtataacatgctgggggatggtgagatcccccatccagcaggtgcctggaaaacttttgcgggtacgacgctatcaccaaaatttggtgaatcatgggcgttgaataccagtgcaaacaaaatcaccgtaaacctcccgaaaggtggcgtaggcgactataacaaagttattcgtctgcgtgatgtgtggtcgcgttgggctaccaacaacgttagactgatccccgcaactggtgatactatcaaaggttccccaactcctaaagatctgtttaaagattttatggatgtggaactggtgtattgttctccgggccgttgggaatacgtcgaaaacaaacagattgacaaaatcacaacttcggatctggcaacagtagcaaaagaaacgtatattgctactcagggacaaactgacttccctaacgtattcggtgttggtaatgaatacaacctgcaatcgttcgaagtttactatcgcggtaacttgcttttcatcgatgagaaagacggattcaatgctgataactcagactatggatcgattggttctgctcctggtgaactggttgcacttgatggtaattcagtacgtcttaaaaacccgtgtaacgctggtgacacgcttcaatttgttacctatctagatgggttagcaacatggcgttcgagctatgaagcgtatgtgatgcgcatgtatcagactggtgatacttctctggaaaccgttcctggtgaacagtgggtaggtgatctggcaaccaaaaaagagtttacacctgctgaatttggtgttaaccctcgcgtgttgattaaccctaactcgtttgaactgcttctcaacggtaaacaactggttaaaggcggtgacgctgactatccggcgttttcctgtgaaggtgcggaaggtgttgatgaaagtacgtgtgttggtaactctggtgtatgggttccgtcaggacaggattatagtttagtattcactgattctgtagtgacttcaatcaagtttgctcaggaactggaatccggcgacgttgtaacgatccgttggtttaacaatgatattggtactctgatggattgggaaggaactggcggtattaaagaaaaagctgataaggtttatctcaataacgaagaagaagttatattgacgaaccgtatcgaatataccgattataataacccttctcagaaaacaatgcgtaatacaggggaaacctatcagggacgtattctggatattcaggcgatgtttgatattatccacccgatcggaaccatctatgaaaacgcacacaacccggcaaaccctgctgattatatgggctttggtggttggaaacgttacgcagaaggttatttcctggctggctggacatcaaatgcagcggatcctgatttcgcattaaacaataatgatttagatagtggtggtcaaccgagtcatacggcaggtggtactggcggcgatcgtggtacagaaatcaaaatcatcaacgttcctgaacttgtatcaaaagataaagttctgatttctgatgaaaatggtgctgtgatcattggtggttgtcagttagatcctgatgcttctggccctggatacactaaataccgtgaggatacattgaaagtgaatcatggtaacacattacctgataaaatcaaaactattccaccgtatatgactgcacatcgctggataagggttgcataatggcttacaacaatatttcaaaaacaagggagggcgctcgcgtcctctctaaagaagcagattacttacagtatgatacttatggtaagttgcctctgatcggcggtaaacgttcgatcggcgaaccaaacattgaccaaacaaaacgcggtgttctgtatggaaacgtacaatccgcaattgatgacctgtatacgcttatcgagcaaatcccgattaacggcgttgttaccatgactgaggatgcccctccaatcgctgtacagcaggttgagagcgtttcttttgatggtattgtacagaacatcgattcagaccaagaacaggctgtagttcacgtatacggcttccctttcatctttgataatgggactaacgccgcaaccgtttgtgaaactgcatacaacaaatttactgaattcgttgcagcggaaaaatatttcgcagaagttaaccgcaaaggtgttgatggtacgatccttgaatgtcgatttattgatagtgttccgcacccggcaacaaatatctcagaaaacggtattcgtcaaatcggaactatcgacgtagccgcaaaaaatggctatggttcatgggttaagttgggttcgggtttcttacctgatgttactccgcaagtaaccgtgtattacttcaaacgaattgcataaggataacacatgagtaacaatacaatcaaccacgtaagtgataaatccatttacgtgacatttgacccaacaggtactgattggcctgataccataaccaacgtacaagatgcgttgggaaaaataggtagttgggcgcgtactgatactgggcttcctatcgcaacaacgtctgttcgtggtattgctcagatcgcaaccgaagctgatattgacgctggcacggataacaataagattgttactccgaaactgttagcgtatcgtatgcagaaccctaaagcatcacaaactgtatggggttatacgaagtattcgactgatgcggaatctacaaccgtaactaacgatgcatcgtctattactccgcgatcactgaactatgtgttcaataaccgtaaaggtacagaatcggtttggggttcttctaaaatcgctaccactgcacaggcggttgctggtacagataacactgtaactatgactccgcttaaagtcaagcaagcgatcgcgtctctggttccggttcagtcaagtgcaaccgaaagctcgcaaggtctggtacaactggcaacagttgcacaggttcaggctggtacgatccgtgaagggtatgcaatttcaccttatacgtttattcgtttaactgcaactgaaagcaacctgggcgttattcgcatcgcatcacaggcagaagcaaacgcaggtactgatgacaccaaagcgattactgcgaaaaaattaatcaatacccgtgcaactggttcccagttcggtgttgtcaaattagcaacaactgttggttatgtggcaaacaccgcactttcttctaatgcttatgtattgcctagcgatcgtagtgcggtaattaatggttctctttatgagaatagcgcaatacataacaacaaatatcagacgtggacagatcttgattggcatttcccagtaggtgctattgtcatgactggtttccagactgaccacggtagtttgtatatttgtgatggacgttcactgaataaaaataattacccgttactgtttgagcgtataggttatacatttggtggtggcggtgattggtttaacattccagactgtcgaggtgttgcagtacgtggtcatgaccgtgggcgtggactaaaccctaatcgtgggtatggtacatatgaaggagatatgttgggatggcacgaacacccattacaacttatctaccagaacggcggtaacattccgaaatggcaagcagtttacgaactgaaaagcgccgagaagaatgaccaaagcgctcgcgtatttgatgcttctataactaaagctactggtgtgggcggtgaagaaacccgcatgaaaaacatcgcattaaactacgtaattcgtactcaatagaggttattaaatgatcatcgacaaattaaatccgttgccgaagatcccgtttgttgatggcgtcccagatgacgccacgactcaaacgaagattatttggatcaaaaacggtgaaactctggacggttcgccagataaagtgtcaaacactggtagtcttaaccgaactggtgtaaacatccagcagaacgcggttcagttagaacaaaataccatcacccataatgataaaatcaacgaagtaatcgatcaggttaacttgattactgaaaacattgatgctattggtgatgaaagcgtaatcaaaaaagttaaccagttggatcaggatgttcaggcattaactttatcgaacacccaaacacagaacaaggtagcacagttaaccctttctgtaaatgctcagaacgatgaaattggtgaatacaatccagaaaaggatcctaaacaccgcacaattcgtaatgatatcatttacatcaagaaagaagttggttcatatcctggatttaacgttgatggtgatgttgacccctcttctactggtactggccttaaataccgcgtactgagtaaccaacgtgccatttctatgcaggaaacccgcataaccaaactggaagatgactgggcgctttccgaagtaggacaactgacagaagaggtaaaagaacttcgtgctgaaatgggtgattctggtcttgccacaacccgttcaatctatgcgcgaattaagatccttgaggatggttctgttgtaatgcaaaatgaacttgatgcgattaatagttatatcggtcgcacgtcaggttcaaccagttccattaacgatcgtgtgaacagtatggaaaactccgttagttctctggctacacaaatcaacgatccggtaactggtatcactgcacaaattacaaccatcaatggtcaaattggtacggtttctgttcagggtagtatccgttatgatattgcggaaaacaaacgcagattgatggatatggaaatgattctgggtgaatccggtgatgaaggattgcagggacaagttgcgatcttaactggcgacattggcgaagattcagatcctaccagtatcaaaggccgtttgagtgttgttgagggtgaattacgcaccaacactagcgcactatgggaactgcaaggcgttgtaggtaactcttctagtggcctcgttgcaactagccagcaggttaacaaagaaatatatggtgatggtgttagtgccgaccccgttactcgtgctggtttgaaaacgacaacccgcaacctgttcactcaggtaggagataactccgaaggtaacgaaacgggcatttatgcactaattgccgaccttaataaacgtgttgaggatttagaagcgttgaacattgcacaggcacttgcagatcgcgtaactatcgaagatctgaatgctaaactggctatgtatatcaaagaagctgacgccgatctccgttatgagagcaaaaacccgcctctgtcattcggtactaacctaactggtgatactgaatacactactggcgatccattgtctctaagcgtaactatgaatggtggtgtttctccgctgtcttaccagtggacgaaaaacggcgtaaacgttggtactgatgctaacacatttaccatcgattcgctacagccttctgattccggaacttacaaagtaacggtaactgatgcaagccataaagtcatcgtttctgatgaactggcgatcactgtcgcttaacgattaacaaggggcttcggccccttttgaggatctttatgattacgaacaacccagcacaattaaaagatgaaattctgcgccgtttaggtgctccgatcgtcaaaatcgaagtgacaaccgaacaggtttatgactgcattcaacgagcattagacctatatgcagaatatcattacaatggatctaacaaagggtatatcattctcaccctggggccggacaacccgaaaaatattttcgatctgagtaaagaacacattttcgcaattactaaagtgttgcgtactaacatgggttcccttgtatcgatggatggtactgcggtttatccgtggtttactgatttcctgatgggccttactggtggttctctgggcggcggtggttgtgcatcacgtacctacggaatgaacgcatatggcgcggatatgggctattttacccagatgatgagctatcagcggtcaatgcaagatctcctgtctccgcttccggattactggtataacgacgacacaggacagtttgcagtatacggaaccgttaaagatggtgatattgttgttatcgaagcaatgatcagatcctttgttgatgtacccagtatggtcggtaacgtcgctggatacgctacagcgggttctgatggtgaagataagccaactatagcagatatatacaataacccctacaaagccgtctcaggcggtgtgaaggctggtcaaggtacaagcgttcatagttcatcctctgcgtataacaaccgttgggtgaaagattacgcaactgctcttgttaaagaggtaaacggtcaggtgctggctaagtttcagggtatgcaattgcctggtggtgttgctccggatggaacccgactgattcaggaagctatgcaagaaaaagaaaacctccgtcaagaacttctgttactgtctgatgcacttccagtgttgatgatgtaaggaggaaaaatgcaaaattgggatgaaaacttatttgcacaactggaatctggggaaggtgtagacaataacctaaaaacagaagttactaataagtatgttaactggtacaagtataaccctactcaacagttgcatgattcactaacagccgaagcaattcaaatgaaatctccggatatgtattacgtccgtcgagaatttgttaatattgataaaattttgggcgaagaccgtgaatcgaagtttacaaaatcgtggaaaattgcagcatacatcgattcgtatgcaaactacgaaggacagagagacttttacagcaaatttggtatgatgtcaaacgatgaaatgacacttgtgatcaatcctcgtttatttgcacatcaaactgatggcgggatccctgttctgggggatttgatttatttccctatggataacagcctgtttgaaattacatggattgagtttgacccgttcttccagttcggcgatcgtcctcaacgtaaaatcaacctcgttaaatttatctatactggtgaagaattggatcctaaactgcaacgaaatgaagggattaaccttgctcccgatgctgatctggatctcgaacctattcgaaatcttgatggattggctgataccaatattgaacaatacgaagaagatcaagcctttgaagatgaaggcgatgaattcattgaatcgtttgatgttgtcaacgggcgcggatcgccgttcgcacagttcccataaatataatcaggggaaaccctatacatgtaagggtataggagaaatcttatacccgctttaacccatacaggaaaaataaaatgtttggattttggtataatagttcgttgcgaaattatattgtcttgatgggttgtcttttcaatcacgtgcaagttaaacgcattcgcggcgaacaagaaaaatttatcaaggttccgattacctacgcatcaaaagaaaaattcctggcatccatgaacaagctgaactatgcatacagtcaggaaaatgttgctaaaacggaaacaattttaccacgtatgaatctatccctcgttgatttgcaatataacgcaattcgtaaaactgggatcgcggtaaaccaaaaaatgacgcagttacgcgcacctggaaaaacagtaacgcagtttaaccctgctccgtatcgtctcatgttcgaactgggagtgtatacccgttacgaagatgatgtgtttcagatcatagaacagatactgccatacttccagccgcatttcaactgtcgtattacagaattacataaaaacgacattaaaatagaccgagatattaaaatatctctgcaatctgtttcccctgataccacgtttgaaggtgatacaacaacacggcgacacattgaatggtctttaatgtttgaattacagggctacctgtatccgcctgttaacgagattaaaggcgagatcagaacagtatacacggatttcttttccaatatgaacccgttggacaaagacaattttgaatccgttgatgctcaggtggatccggttgatatgcctatacaggattacacgggagaagaatacgttcaaacgtatgctaatgatatcccaattcctagcggtgatcaacctcctaaaccgaggggccaataatggaagaatttagcgtaaaacaactacttgatcttgaaaatctccctggtgctgaaactggggaagaaatggttgtatatgaaaaactcgaactcgttgatgtcgagtcacacccagcagatcgaaaacctgatttagaggaagactatgcacttgcgcgtaaaaccgcgcattacatgaatcagatgatcatggatatggcacaaattgccttgcataacgctaaaaactctgaatctccgagacacgttgaagtttttacaaccctgatgaatcagttaaacaattctaaccagggattgatgaaaattcataaagaaatgcgagaaattaccgaagagacgacaaaaccaggatctgaaaaaggtaatggcggcggtaatgaaatgaacatagagaatgcaactgtatttgttggttcccctacggaattaatgcagaaatatggtagtgcatacgaacccaaagaaggcttcattaatggtgaagcggtagaggtaaaccctgatggaaatggaaccgacgatcgatccgagtaaggaatcagatcacccaatcggattaatgcatcccgattatctgaaaaagaaaattgatgaatttgggatggagtggacgcaaagcgaacatgataaaaaatggtatccgacaaagtttagcgattacctaaaaattaacggtatccataaagttgatattcaagcaaaagacagttcaaactttgcgacgtataaaaacaaaggaaacaagaaaactcgatataacggaaacccaaacctgaaacgcgcgtacatccaaacgaaatggacgcaacagatgttgatggagtgggttaaatgtcgtgatgatattgtttattttgctgaaacatattgcgcgatcacccacattgactatggtacaattaaggttcagttgcgtgactatcagcgcgaaatgctgatcgaaatgcataaaaaccgtatggttgcctgtaacctgtctcgccagttgggtaaaacaaccgttgttgctatcttccttgcacactttgtgtgtttcaacgaggataaatatgttggcgttttggctcataaagcctctatgtctgcggaagttctggatcgtacaaaacaggcgattgaacttctccccgatttcttgcaacctggtatcgttgaatggaacaaaggttctattgaacttgataacaaatgtaaaattggtgcgtttgcatcttctcccgatgcggtacgtggtaactccttcgcaatgatctacattgacgaatgtgcgtttattccaaactttattgatgcgtggttagcgattcagccagtaatttcttctggtcgtaaatcgaaaatccttatcacaacgacacctaacgggcttaaccacttctatgatatctggaacgctgctatagaaggaaaatccggcttcgtgccatacacggcgatctggacatcggttaaagagcgtttgtatacagacggtgatgatggcgtatttgatgacggctattcatggtcttcgaagatgatcgccagttcaagtaaagaagcatttttacaggaacactgtgctgaattcatgggaaccaacggaaccctgatcgctggctggaaattgtctaaactatcatgggttgatactgatgaaacggaaactaatttctatcagtataaagctccagtagagggacataaatatattgcggtactcgacccagccgaagggcgcggtcaagactatcacgcgatgcatattatagatattacatctatgccgtttgaacaggttgctgtataccattcaaacaaaacatcgcaccttattttgcctgatgtcctgttacgttatcttatgatgtacaacgaagcatgggtttatatcgagctaaatagcacaggtcactcagtggctaaatctttgttttctgagttggattacgataacgttatttgtgatagctataacgatttggggatgaaacagagtaaacgatcgaaagcgattggctgctcaaccctaaaagacttgatagagaaagataaactcatcataaataacaaaaagacaatacttgaatttcgtactttctcagaaaaaggtgtttcgtgggctgcggaagaaggtttccatgacgatctcgttatggcgctggtttgctttgcatggctaacaacacaaatgaaattcgcagaattttgcgagaaagacgatttgcggttggcaaatgaggtattcgcacgtgagcgcgaactgctttatgaagatatgttatgtcctgttatcgtaacgagtggcgacgaaacaatatctgtcggccaacacggtatttcgtttatataaatttagaggaaacttaataatggctttaatctctccaggcattgaaactaaagaaacatcggtacaatctaccgttgttcgaaattcaactggtcgtgctgctattgttggtaaattttcatgggggccagcttaccagatccgtcagatttctaacgaagtcgaactggtaaactattttggctccccagacaatgacaccgctgattatttcatgaacgctgtaaactttttacagttcggtcaggatctgcgtgttgttcgtgtcgtcgataaagaagccgcaaaaaacgcaaccgcgatctataatcagatcaaaaccacgatcaccgctgctggttctaactatgcagtagacgatcagatcaaagttaaacacaataacgttgttattgaagaagatggtgttgttaccagcgttgatgatcagggtaaaatcctgtctgtgttcattccgagcactaagatcatcgcacacgctaaacaggttggtgtatatccggatctgtctagtggctggactacagaaatcgtttccagttcttctggtgtttctgctacgattacaatcgatggcgtagaagttgatccgggtattactctgctcaaccttgacaccgcaaaagaaactattcaggcaactgctttccaggaactttgcaccaaataccagctaccgtctgttattgcaatttatcctggcgaaatgggtagcaccgtaacggttgaaattctgtctaaagctgcatacgattcttcggctgtcattaagtcttatccttctggtaagtctggtaaaaacagcggtcgcagttcgatgaactttggccctcagaatgataaccaatacgcgtttatcgttcgccgtggtggtattatccaagaaacgtttatcgtgtcaaccgctaagggtgataaagatatctacggttcaacgatctacatggatgatttctttgcaaacggtggttcgcagtatctgtatggtacgtccctaaactggcctgtcggattctccggcgttctggaactgggcggcggtacttctgcaaacgccactgtaggcgctgatgaactcatggctggttgggatatgttcgcagatcgtgaatctctgcatgttcctctgctgattgcgggtgcttgtgctggcgaaactgccgaaatttcgtctactgtacagaaacacgctgtgtctatcggtgaaacccgttcagattgcgtcgtattcgtttctccgccgcgttctgctctggttaatatcccactggctcaggccgttgataacctcgtagaatggcgtacaggctacaaaatcggtaatactaccccagttgataacaacatgaacgtaagttcaagttatgcgttcatcgacggtaactataagttccagtatgataaatacaacgatgttaaccgttggatcccgctcgcgggtgatatggctggcctctgtgtttataccgatcaggtatcgcaaccgtggatgtctccggctggctacaaccgtggtcaactgcgtaactgcatcaaactggctatcgaaccgactaacgcgcatcgcgattctatgtaccaggtacagattaacgcggttactggtttctctggtggtgctggatacattctgtacggtgataaaaccgcaacgactgttccaagcccgtttgaccgtatcaacgttcgtcgcttgttcaacatgatcaagaaagacattggcgataacgcaaaatataaactgtttgagaataacgatgatttcactcgttcttccttccgtatggatgcaggacagtatatgtctaacgttcgcgctctgggcggtgtatacgattaccgtgtggtttgtgacactacgaacaacacgccggatgttattgatcgcaatgagtttattgcatcaatctacgtcaaaccagcacgttctatcaactacatcacactgaacttcgtagcaacctcaactggtgcggatttcgatgagttgattggttcaacgtcagtataacatgtaaggggctgaaaagcccctataaatacacatagaggttagaaaatgcttactgatattgtacgcgcctttgaatccggtgatttcgcacgtccgaacctgttcgaagtagagatcccgtacctgggcaaaaactttaaattaaaatgtaaagccgctactatgccagcgtctaccgttgaaaaagttccggtaggttacatgaaccgcaaaattaacgttgctggtgaccgtacctatgatgactggacaatcacggtatataacgacgatgcacacacaacccgtgatgcaatcgtagcatggtcaaacatgctgcatggtatgggtgaagacattacaggggatatccctgcaaactacaaaaaaaccgctacggttaaacagaaaaaccgtaacgacgaagtaaccgccgaacataccatttatggcctgttcccgaccaacgttggtgaggttactttagactgggatagcaacaacgaagtgagcacttttgagtgtactttcgcgctagactggtgggtttaaacgctataaatacaggggtagcaataccccttatcattatttttcggagttgtaaatgaacttttttggattagacaatgtgttagggtttttcaaaaatttcgccaaacaggatgaaatggaatttgaagcccaattaaaagatgatacaggttcgattgcgcctccgaaaaataacgatggggcgcacgaaatcgaaacggacttatcaaaccagcgttattcttctgtgttccaacagttctattccggacaggatccgcgaattcagaacaaaacacagctaataaatacataccgtggcatcatgacatacccggaagtggaaaacgctgtttcggaaatcattaacgaagcgattgttaatgaacaagggaaagatattgttacgatggatcttactaaaacgaattttagtaaaaatatccaagataagatcatggaagaactcgataccgtaatgaatattcacgatttcgataaccgaggctctcgtttattccgtgattggtatgttgattcgcgtatctatttccataaaatcatgcacaaaaatgaagctgacggcatcaaagaattgcgccagttagatccccgttgcatggaactgatccgagaatcggttacagaaaccctacccggtggggttaaaattttccgtggctatcgtgaatacttcgtatacaccgcaccgaaaaacggttatagctacaacggacagatttatagtcacaatgacaaggtaaaaattcctcgctctgcgattgtttacgctcatagcggccttgaagattgcgacaacaacattataggctacctgcaccgcgcggtcaagccagctaaccagttgcgtttgctggaagatgctatggtgatttaccgtattacccgtgcgcctgaacgtcgtgtgttctatatcgacgtaggtcagatgggtggccctaaagctacacagtacgtaaataacattgcacagggcttaaaaaaccgtgttgtatatgacgcgagcactggtaaagttaagaatcagcaaaataacctgtcaatgacagaggactattggctgatgcgtcgtgatggtaaagcagttaccgaagtttcaacgcttcctggtggcactgccttctctgatatcgacgatgttaagtggtttaaccgtaagctgtatgaagcgttacgtattccgttaagccgtatgcctcgcgatgatggcggtatccagttgggtaacgatggcggtattacccgcgacgaattgaactttagcaaatttattcgcgaattgcaaattcaattcaaccctgttcttgcggatccgttaaaaactaacttgatcgcgaagaaaatcattacagaagatgaatgggatgaaaacgtaagtaagattgcttttgtatatcagcaagattcttactattccgaaatcaaagatattgagattttggaacgccgtttaaacctgatgggccaacttgaaggggtggtcggcaaatatatctcccataaatacgtaatgaaagaagttctccggatgtctgatgaggaaattcaaagcgaagccaaacagatagaagaagaatcaaaagaagaacgttttaaaaatccagaagcggaagaggaaaacttttgatgaaagaatttatcgaagcaatcaaaagcggtaatctggtggaagctaaaaaaactttttactccatcatggaagaccgcacagaagcgcttcgtcacgaattgcgcgttgaacttgccgaagctgtacgcatcgaaggcgaagaagacaaagaaaaagacgacgaaggcgctgataaagatgacgaaaagggcgataaaaagccagccgaggatgataaatccgataaagatgatgagtgaggtgtgtaatgcaacttgacatcgaaatcaccgccgaagatctccatgaacatttagacgaagcgaaagctcgtgtagatattctgggtatcgatgaaggcacggttaaaatcatcgaaaatttggcggtcaccgaaccaaatttagcccttgctatgatggcggttgttgaaggtttaacacttgatgaggtaattgtcaagcatgttgattcccgtggcaacgtagaacgcctcaaagacaggaaaacccgtgagcgtaatgcgtatcagacgaccggattaactaaatcccaacgtcgccagatcgcgcgtcgtgctctcaaaacaaaacgtgctaacccgtcaattgctactcgcgcacaacgtaagcgcaagaaagcattgcgtaaacgtgctgcactggggctataaatatgaatgaatcccaaatcaacgaaaacggcgatatgcttttaatcgaagaatggggtttaccttgcggtgacgtttcagaatctattttagaatctgttggggaatcaaaagacggtaaattacggatcgaaggtattttccttcaagccgaaaaggttaaccgtaaccgtcgtttgtatcctaaaaacgtacttgaagaagcagttaacgattatattagaactcaagttaacacccgtcaagcattaggtgaaatgaatcaccctccgcgtccgaatgtggatccgcgaaatgcttgcatcctgattgaaaaattgtggtggaagggtaacgatgtttggggccgcgctgttgttgttgaaggcgacggtggtgatggtgacaaactggcggcgttgattcgtgctggttgggttcctggtgtttcttcccgtggattaggtaagctctccgattccggcaaaggctacggcgttgtacaaaagggctttaaattagctgtaggcgttgatgtcgtctgggggccaagcgcacctgatgcatatgttaagcctatagtggaaaatcagcaaagcaaaccgcttgttgagaataatagtgctgatgacgcttttcgggaattgtccgagcgtttgaaaggtctataaatacattaaacaaaacaacaggaaaatcaaaaatgcttaaagaacaactgctggcggaagcccagaacctggatactccggtcgagttagacagcattttcgaatcagttgaactttctgatgacgtgaaagcgacattcaccactgtattcgaacaagctgtaaaagctggcgctgcaaaactcgctgaatcccacattacccagatcgcggaacgttccgacgaactggtcgaagctcaggtaactgaacgtgccgctgaaatcgaaactaagctgtacgaagatgctgataaatattttgcgcacatttccgaagaatggctgaaagaaaacaaagaagccgtttcccgtgacatcaaagccgatctgtttgaatccctgatcatgggcctcaaagaagttctggttgaacataacgttgtcattccggaagaacaggttgatgtagtcgccgaactggaagacgaactgactgagaatcagcaggaagttaaaaccctgtttgaagcgaatcaggaactgaccaaagaaatttcagaaatgaaacgcaatgcagtagtttcagagaaaactaaaggtttgaccgaatctcaggtcgaaaaagtagaatctctgattgaagggctggaatattccgcaaccttcgaaaataaactcagcgcaattgttgaaatggtagcaaccaaagctgaaaaacccgttgacgagtctgtaaatactccgcaaacgaaagataactttgttccggtagtagaaagtgttccggcagagaaatccaagatcaataaatatgtacaagcggcaaaagccctttcttaatttcaaaaggtaagaaacaatgtctaagaaaaacgaattgatggaaaaatggaacgatcttctggagtctcaggaaggcttaccggatatcgctaccaaatccaaaaaacaactgattgctgccattatggaagcacaggaaaaagacgcagaagttgatccggtttaccgcgacgagaaaatcgttgaatccttcggtggtttcctggcggaagctgaaattgctggtgaccacggttacgacgcaaccaaaatcgcttctggtaactcaagcggtgctatcaccaacatcggccctgctgtaatcggtatggttcgccgtgcgattcctaacctgatcgcgttcgatatctgcggtgttcagcctatgactggccctactggtcaggtgttcgctctccgcgcagtgtacggcaaagatccgctggcttccggtgctaaagaagcattccatccgatgttctctccggatagcatgtactccggtcagggcgcggctccgagcaacggctttaccgaactggcttccggtactgcgatcgctgacggtgctatcgtgttccacgatttcggtgaaactggtcgtgtgttcctccagaacgtttctggctctccggttactgtaactggttctaccgatgatgctctggatgctgctgttatcgccgaacaggaaaaaggtactctggctgaaatttcttacggtatggctaccagtgtagcagaactgcaagaacagttcaacggttctactggcaacccgtggaacgaaatgggcttccgtatcgataagcaggttatcgaagcacgtagccgccaactgaaagcacagtactctgtagaactggctcaggatctccgcgctgttcacggtatggacgctgacgccgaactgtctgctattctggcaaccgaaatcatgctggaaatcaaccgcgaaatcgttgatatgatcaactataccgcacaggttggtaaaactggtttcactcagaccgttggctctaaagctggtgcgtttgacttccaggatccgattgatgttcgtggcgctcgttgggctggtgaaagctacaaagctctgctgattcagatcgacaaagaagcaaacgaaatcgcacgtcaaactggtcgtggtgctggtaacttcatcatcgcttcccgtaacgtggtttccgctctggctcgtatcgatagcggtatcactccggcaggtcaaggtctccagaagactctgaacgttgacaccactaaagcagtattcgctggtgttctgggtggcgtgtataaagtatacatcgaccagtatgcacgtggtgattacttcaccgtgggttacaaaggcgataacgaaatggatgctggtatctactacgctccgtatgttgcgctgaccccgctgcgtggttctgatccgaagaacttccagccagtaatgggcttcaaaactcgttacggtgtaggtatcaacccgtttgcgaactctcgctctcaggctccgtccgaccgtatcacttctggtatgattaccaaagaaatgttcggtaaaaacgcatacttccgcaaggtttatgtgaaaggcttataagttattgaaaaataacgatattaaagggaaccttcgggttccctttttcatttctataaatagtgaaaacgattgaggctatattatgaaacatattatctacaaaataacaaatttggtcaataataaaatttacgttggtgctcattcaacagaagacatcaatgattcatacatgggttcaggggtggctataaaggcggctcagaggaagtatggtatcgataaatttataaaagaaatattacatatttttgatacccgtgaagaaatgtatgaaaaagaaagagagattgttaatctagaatttgttaataatccacatacatataatatgggtatcggtggtgatggtggccctatgttgggtatgtttcattcagaagagaagaaacaagaaatttccaagattactaaagagagaatgacagatgaagtaaaatctcgtctctctaaacttaaaaagggtaaaccacagtccgaagaatccaacaggaagcgctcagagacgttaaaagctaaatatatgaatggacgtatagacagagagtataaacctctcacagaagcgcacaaggcgaaattaggccgttctgtatcgatagatggagttgtatactcatccggatcggaggcggcaaaatcccttagtatgtcccactctggtttaaaatatcggattaatagcgacaaataccctacctggaaatttgttgcataaataccattatacactttacgcaggaacataaaatgagtgaaaaattttacacaattaacaagctggtgcgtcagtcacagctaccgcctggcctgtctaaaaaggttcttgatgaggcaaccggaacagaaacaattaacgtagctaatacccgtccggatctggtatctcttacccgtgcggtaaacaacctgatctacggtgaacttgtagcgattcaggaaactaatttgcctaccgcaaccctgttcggtgtgcgttatcgtaaccctaaaggcgatatgacgttttccagcgctgctacctattccggtaagtatgcaagccgtgataacattccagttggtgcggttggtactgcctataccaaaggccaagtttttaaacatccgacaagcgatgtcgtatacgaagcaactgatagcgtaactctcgcaggtgctgatattgatgaagcaattatggtcgcagtattcagcaataaattacgcctggcaagcgaagccgcgccaacaagtcagtatgaaaccagcgaagatattagcacaacttctttcgaaatggatcgttggaatatcaacgttcgttcccgtaaattcaaaactgaaatgaccgtggaacttatgcaggatctggaagcaaaccaattcaacgcagaaaatgtgattgaagatgttctgggtactgttgccagcgaagaagtaaacaaagatatcattcagactctgatcaacgtatcacatcgttacaacgttgatggtgtggtaacaaatggcattttcgatgctacaaccgcatacactgcaaaggatgctccggctttaggtcgtttcctgtatcaattagtgtgtgaaatggggcaggaaatgaatagaacgacttcatttgaagctacctatgtcctggcctcttctcgcgttgtaagcgttctgtctgcgtctggttggatgcatgaaactgatgaaacccacccgttagcaacaggtcgacttaaaaacggttactatgtctatactgacaccactacaccgtttgattacctgctgactggttgcaagtacgatctgggtgaaatggatcatgttggctctctgttctatacgccatacacagaagctgatcaggcaggttcgatcaagatttctgttgatcctcaatccttacagcctaaagttgctattctgatgcgctacggtttatcggttaacccgtataccactgctgctaatgaaagacttgtgaaaggtgatgactgggtaaacctctcaggcaaatctaaaatgagtcagattgttggtatcaaacttcctaaactgggttgatagtataacccaacggggataatattcaataggtggagtagggaaacttactccaccttttaataattattataattaatattaaattagatcttgaatttataaatgatttatgataaaatttattaattataattattatagatcaaataatttttgaaatcaagtaaaaataaatttgattttattaattagatcatgtataattattcttttaataatatattatattagatcaaataaaatttgactacaaattaatatagtatattatagatcaactgggtaaattggtgagtatgttatgagtttgaaattagaagatctgcaaaatgaacttgagaaggatatgctgatagatcccctcaagttgcaatcagaatcagcggatatcccgaagatttgggctaaatggcttcgataccattcaaacgctaagaaaaaattgatccaacttcatgcgaaaaaagaagctgatgtgaaggatcgtatgttgtactacaccggaaggcatgacaaagaaatgtgcgaagtggtgtatactgggactactgaaattaaaatcgcgatcgctggggatccgaaaattgtagaaaccaacaagctgatccagtattatgacatggtggtagatttcaccagtaaagcactggatatcgtcaaaaacaaaggatactctatcaaaaacatgttggagatccgtaaattagaaagtggtgcataatgtctactgaaaatgaaaaatgtgtagtgtgcaagtgtccggttccttctactggttttgtgactgaatctgggcgcgtgtgtagtactatctgtgctgactacatcgcagaaaaaacaaaaaacggcgagatcaacgaatccgatgatctgaatgaagttcaaatgttgctgtaggagaatcttatgattggttacggtgaaggaattacagatcgtgatgaacgtccagatctcttagaatctgacgaacaccctgatttttagtgcataaatactagcgtacccgaaaggggcttgataaaagaatgctggatgataggcgtactcttttgcgccgtccgatggagtttaccttcggcggggtgattgataacataccttcgatcaagggcatgagtaaaaaaagccagaatagtacctcactggctataatcaaatgtacgtgttgggctgattgcgtcccaaaattaaaaagccccttcctttcggttggggcttcttttttagaacttttcttcttctccgctttctagttcggcctttaattcttcggctcgacctttcagcgcatcgcgcatagaaatatcgtctgacggcgcaacatcaacttcttttacacgatttttgtaatatttttcaagctctttaaggccgtccatagtacggcaagaggcgaccttgctcatgaaatcatcaatagccgcctcataaagtcgaaaatcgttgaaactcttcattttgacctctaaatttcgatttgtttgatcacgtagtcaaacttttcttcattgtaaatgcgtactcgttcgattgcgtgtttcataccatagtttttgtatgaatatttatttttagcatttttggactttgccagcgttgctaagttatcaaccaaatcccaaacagtagcaagagatttagaatcatgtttacgcagtacgcgcccaattgactgtttgactataacagcagatttgcacggatgcccgaagatgatgtgatgaaggttcttaacagaaatacctgtactcagtacgccaatagaaccgattacgatcagccccttcgttgactccgcgatccgtttcatttcgtttcgctcatcaatccccgtttccccagaaatgtatacaacgttgtcatatacctttttgagttgctcatacagccatttaccatgtttgatctgattgaacatcacaaacacgttttcatctttttcccttgccagtttcaacgccagcttacagatccatgcgttacgcctggtatgcgatgttatatacttgatttcgctttggtaatcggcccccttcattttcttaatctcatcctctttgtatctcatgaagatggtattaattcgaaggttggtaacttgaccttcctgcatcaatcgatttgtatcaactggcttgaagatttgaccaaaagcgccaatgtattgcatcatgtttgctttgccttctttcagagaaccagaaagaccaaacttgaaaatacactgatccattgtgttgatgatcttctgtatgctttgtcctgttgatttgtggcattcatccaccatcaaacacatgaactgctgaaaccactcaggaggcattttaacagccgattgccacgtagacacgtagatcaatgcattactgtttttagcagttcctgaacgtattccaagcattgcctcgcgaggtaaaaggcgatagtttacaatatcaccgatcatctgatcaacaagggcggttgttgggacaatgattagtactttgcctgtgtaattttccagacaccaacgagatatcaacccctggataagagatttacccgctgacgttgggaggttaagcacagcacggcggtttttaatcgcatggaacaccgattgtttttgataccaatacggatcaatctgcttgtttccgtcgtatactgggtgttcttctaaccacttgtcaaaatctggctgggtaatttcttctgtttcgtggatcttaggatccatccagatagaatacccgcgagactccgcgaattttgttacaagataggctaaaccgtagggcagtttcccgttatagtccatcaagtatatgtagccgttccatccaccatatttgtattttgcctggtactgataacctggcggctggaagctgaaatagtcgcgcaattcatagactatgttagcctctgcctgaatctgcacatgactagtgttaaggaatttgacttcgatatccactatgtgtatcctatatacggtttatatgaatatttataggctaaataatgataaacattggagaactacaatgagtattgattacgaaaaggttgaaggtttcaaagccttagaacaaaaagaagccaaattacagcttgctacctatgcgcaagaaacgtttgatgtcaaactgaaccgccagaagtcattcgaaaatatgcttgctgatctggaatctgccgtaccagcagaaaagccggaactgttgatcgactcccccgatcctgaaattgttacatacgaaggtgaacaatccgttcctgatgttgttattgatgtgactaacgatttcatggattacgttaaagaggttgctccggaaatcgcagaccagattgaaattgttcctgacgctctacaagctcctgtaagcgattctgagacgttttctgatgaactggcatggatggaagggtttaccccgtctatcatcatgatgggccgctctgtttcgaatactggcttttatacgtgtccgtattggatctatgattggatgaaacaaaatccggattggtacaagcaccctgacagttgtcctcattattcagcgcgtcaaaccctcaagtcgctggcatggtacatgcatcgtgatgggatggttactgtaagggaaacccgaaacagccagttctacacgttcaaaaaataattttaaaaagtagttgaccttaccctgctattcgagtatatttgtattcgaaggcgggggaatggctctcgcagtgaagaaggaaatacaaaatgaacatgatgaaaaatgcttactacccagttctgtttgtttggactaatggtgaagttaagaaaatcgtcaattctaaagctccttattacactgttggtgaagcacttcgccacgctgcggaagcaaattatcctgctcatgccgaacctggttatgctcgttggaacggttctaaatgggttgctgatacctgggacaactacgaagaagaaagaatggagtgtgatcctgattacgtatctcgtcaaatggaagctcatatgattgcagatcgtagactggataatgaagttcgcggattttattgattaacaaggggctacggccccttttcttttaggtgaaatatgaacttaaatcacgaatgtttaaaagatttgagcgatggtaacgagattggtaacgttatttttcttgatatcgatggcgttctaaataatatgcggtgcatgaaatttggtgaacatatggacatcgaatgcgcacgacacttacgccggatagtgaatcacgctaattgtgatatcgtcatttcctctacgtggagaatcggcaacagtacccataatctacgtgaaatattttatccgtggggattgtatcggatcattggtaaaacttgcactaacttccctcatagcactggaatgcgtggtgatgaaatcaaggcatggatcgatactttcggatgtaaaaactatctcattcttgatgatgacaccgatatgctttcttcacaaaaagatcattttattaacactgatgggtttgttgggttgaccgaagaacaatccacttatgcgatccgtaacattttcggggttactactccgttttgtcctgaatgcaatgggtatggacgtgttaacggctacgacaaatgcggaacgtgtaacggtaaaatactccggctataaataccaataaacataagaggttaaatttatggcaattccttctgtaacaattagcgccaacaaaaacgaacttttgattggcgaaactttgaccttagaggttgaaactactgaactagatccgggtgatgtgtttctggcctatcgttggcaaaaagatggtgtagatattccaggcgcaaccgccgatacttacacaactacggttgacggtacaactgctggtgattataccctgatcttaaaacacggtgctgatgaagaatcagcaacagaaaccacgtcagatacaatcaccgtgacaacttattctgatgatctcgtttctaaatggacggttcacccgattccgtggcgtgataccagctttaccccgatcggttattgggtacttgatgaaattctgtatcagaaagcacagggtaaagattggaaaactgattatgctgattacaagtatagtgaggaagtacaaacgatcctgaaagcgttcatggaaaacggtgaatgtgagatccaggattcacgaaacggctatattcataaaatgagtgaaatctaagaggctttaaatggcaactgaaaaatggactacggttcatcctattccgtggagaaataccagttttacatatcttccatactggctatacgatattatcgttgatgcttttgagaaaggcgacgactggcgcgattatgcggaagaaaaatataaattagagtttgatactctgaaagaggcgtttgaagattatggtgatattcatgtaatcgaatctcgtaatggtaaactggttagtctgttgtcattgactcctgctcctgaaccagatcctgaccaataaaataaggcaaacaatgaatacacttctttttgatttcgacgacactttagcagaattttctcagactttttatgataagttcggtgtacgtccggaaggaacgccaaaagaacgatatgacgaaatggcggcttctttggtgcgtactgatttttataaaaaccttccccgtattcaggctgggattgacctccttcaatggagtttccaacgccgaatcggtgatcctgctactttgctgcttcgcgcggaagcggtcagccctctttgggttatgaaagaaaaactgaactatacagataagatttgcgctgaactggggatccctcgtctcgattttagtcgcattgactatccggaacagttcgcagaacatgcctatcgtggtgttctgatttcccgcaaccagaaacatcttgaaatctggaacaattctcatctagctaataaagttcctggtattttccttgcggaaaccctggaagaaaatattcagctagtcacggaagcgcttgcaaaggctaatcaataacaaaaaagggaaccgcaatggttccctttcttttacaatctttttaattcatcaagcgctgttttcttatcaccaacaaagaggattgctttacctcctgcttttctgaaaggcaacaccgcttttgcccgatcgtcaaacagaattcctttaccagcgaatgctgctttttcatggctacttttaacgtagtggaattctggaacgtaacccaatactttttgcaatgctttacgtttttgttcggcaacaccgtcagaattgaatttaccgacactggttagtattgctacatcaccaagtgttcttaaatgatggaataattcaaatccttctttgattggttccagattttcgtagaaatcagttttggcaatttttgctttgcactttttcaactcatcttctgtcatcatcgagggttcgccatacattggcacaaatgaaccttcccagtcgaacaatacaccatccatatcaaagaaaaacttattcatatcaattcctcagtttgtgtatgcatactataatgtttaatcattaatgtcaaccccaagtgtcagttttcggtgcgtatgctgcaactttagccacaatttccttatccagttcagctacagatttctgaggcttaccacgggctttaactttgatgtagtttgacttaacaacaaacatccctttgttacctgatttcttgatctcgctatcaacaccaactttgttaaagctgatccaaatgtcgccgtccatatactgtttaagagaatcacccatgttcaggatcttcgccatagtaagggccgcgccttcgtgggtatccatgagaatttctttaggaactacacgatcgcgtttctggttctgctgcatagcaatatgcacatcgttcataacccatacgatatgtacgttttcttttttgtatcccagcgtttcgacatcacgcgcgatgcttgccagcttgctcatgccttttaacgttacgtcaaagatgaggttaggtttacgatcttctggtgctgccataataccggaataaacacggttttggtttttgttggaaatgttgaaaacgtcggcgatcacatgatggagggtagatacgttttctgggtttttgaggttcattgttttgacatcatgacccgtttgtttcttgatctctgctgcgagtttatcgctacccattacaagttttttcagggcgtcaacgtccagtgtaataccttcgatgcctagcagtttttccagtgtgaatcctttaccggaaccagcaccgccagccagaataacaacctgaccaaacttaggataagcacggcccccgaaggtgatcagcgcttcggttaaggtgctttctgtgaattgtttaaatgacttcatgtaaaattctccagtttattttctattatttattgacatgctttctgacagtggtgtatggttatggtgttcgacggataggccggaagaactttaaaccataaggtatatgatatgaaaattgatttacatcgcttcattgcagaattttcccgcgaccgcgacatggactctttcaactactactcccgtgaaattgaagatcgttttgcggctcatgttgggttccgtcgccaccatactcctaaaatgcgccctgaccacgatccgaagtatagccatatcacatggcaagccccgatcaatggttacgttgaagggatccggatcatgacgtttaacgcgatgtatggaaacgctttgatccatattgcacgtgagaaaaaggcagaattccctaacggctggcgtattgatgaagtgattcaaacccttatgcagttacgacgtgaatacaaagctggtatgtgtctgcgtaatgaacagtatccgatgtataaaacgtatgcctatatctctaagcatctaattaattccatgttttacatcgttggtaatcatggttccgctatagatatcggttcttatgaaatcgtggcttatgctcgcgaacaaggaaaggccgctgcactgaaaatcattgaatctggtgctatcattcttaaccatcgcattgatactattgcttactatggcgatcaggttgaggttgaaggcgtacaccatgaacgattcaacaaagccgtatttgctaaaaatggttatgcttatggtaatgacattataacttctgctattcctttcgttcgtctaactgttgaaggatttggagaaaggttgccttataaactgtcagaagctcaaatgtgtgcggctgctgaaagaatcgccaaaaagcggaaaatgtataccgatgaatacctggcgtatgtcaacaagacaaaagaagatgtagatcgagaaatttcttgcatggatttgtgcctttgatataatgtaagcatcttttaaagggaggatgcatgaaaacgatacattgcagaaatgaaaacgttgtttactatcacggttcgtgtactgctgctggtattgaaagcatgttattgcctccctgtgattctgatactctgtctgaaaaaggcaggaagaaaaatttagaccgtgttttctttaccgctgatatcgggttagctcgtatatacgctggaagggccgcgcgttctataggtggggatcctgttctgtacagggttgtgtgtccggttgatgttgtatgcatgaacgaagacaaaggcgcgagcgtttaccatgcagcatgggcgttttgtgaggaattatgaatgataaagtgttggcgtatctcgttttcttgctgggatatcgcttagaagtgatgggcgcgtattcatcaatttatggtgatttaacggctatctggatggtcgggttaggggttgcttttacattcctttcctttgcaattgttaatgaatcggaaaaggatattgtatgaaactatatcatgtgatctactctggtgttttaggcattgacaaacaaatgttagttgatgtaatgtgtaaaaaactcgatgagcgaattggaacccgatacaaaaatcatgtatcggaaagtatcttcatcaacgttgaccatccaaatgacatggaagaaatggttaatactcttgatgatcagcagatcccgtttgttgacaatttcaacatgagcgctggagtgtatacggtagtaacttttgttctaaaaaatgttgacagtcgaaacgatagcgtgttgaatgtagttgcaaaaatcgattctaccaaaggaaaataatatgaaaattgtacaccgtagcatttccgaactgtctcaagctgaaaaagtgcaaattcatttcaaattcaatgatttgcgtaaaggttatgccgaaattgcccgtgaacatgggttagataacggcgatatttaccaggtagtacaggaaattgaacgtatccgcgcgttccgttctgcaaatctccctgttaaaaatgcaatgcgccgcgaagcgatcgaaatccatcgtaagcgtgtgtacaatttagaacgtgctaaacgtccgatgaagaaagaaaagaaacctcgcccgtttaaacgcgaacatcttaacacctctatggcgctggcgtttcaagatgcggggattatctaatgcgtaaatctgcgatggatcgttgggctagtattgctacttcaaacgtaaaaccaaatcaagccgcgcctgatgtagaagcggttcgtaaagcaaaagaacctgagatcgtggcccttagccctgaactcatcgagcatcgccgtcgtgcgtctgctattgaactggatctgcgtattgcgcgttcatataatctcaagcatgaacacgccgcaaagaacaaccattcttttgaccttactctggaagattggaaagtgttgatgacaactgaacgttgtcagtattccggcaagatgtttagcaataaaccaggtagcccatatgcccgtacaatggaacgtattaatccacgtctgggatatacacaagaaaatacaatagcggttatcaacgccgctaatgccgaaaaatcacagcttgatgcattcgttaagggtgatgtcattctggatgaagtaaaagtgaagttgctgcgtaaagcactttatcaagttgaaaaacgtgtgaaaatgaaaggttaaattatgtttaagaaatattcttctctgactaaccattatgaaggtaagttcatcaatggtgtaattatgaacgggcttactggcggtgtgtgggttgcacgtgaaaagatccacggtgctaactttagctttatcaccgatgacggtattaccgttacccccgcaaagcgtactgatgttgttaagccagccgaagatttttatggctgttcagcagtagttgcaaagtattccccagggatccgtaagatgtgggaaaccctcaaaaagaccggaacttatgatgatttggttattcaagtctacggtgaatttgcggggcgtggtgtacagaaagatgttgattacggcgaaaaagatttctacgtattcgatatccgcgtaaatggtgaattccttccggataacctgtgctcgctgatctctcgatctcatggcctgaaaatggccccgctgttgggatacggtacttttgaagagatcaaagaactgccgatcacgtttgaatctgttgtgaataaagcaaatagcggcattggtagcgataatacagtatatggtgaattcgtatatcctatcatggaagttgaagagggaaacattgcagaaggttttgtaatgaaacctgtttcacctgcttttatgccaaacggtgaacgcgttgcaatcaaatgcaaaacaaccaaattcactgagaagaaagcgaagaaagcaacccgctttaatgctccggtttcactgtcagaaaaagacaaaaaccaactcgatgagtttgtttgttaccttacagagaaccgtgtgaaaaacgttctttcgaaactggatctggcttcgatcactgcgaaagatttcggtcgcattatgggcttaacggttcaggatgctatcgaagaaatcagccgtaatcatgggcctttcctcgaacagttcgaagacccagcaatggctaaaaagctgtttgtaaccgaagcccaaaacatgattcgccctgtatggggcaaaatcctgaaccatgaattttaatcagattctggttgatgcaaaagcggcttccctgatcggtagccgtaaacctcctgaacgtatcgcaaacattgctgttaaaatcggacgtgctttgaacgaacgcgggatcagggcttattctggcggcgctcctggtatggatagtcactttctgtttgactatagtccggataacagatgtataatccttcctgagaacgggtttaacggccttttctcaaacggaaaggatatcatcgactttcgagatttaaacacacagaaagccgctgacgaagccagaaaggtagcaggtaacttcgatacacagaatgaatacgttcaaagaaggtatgcgcgaaacacgattcaagttcttcgtgaaaatcttgacaatccaactgattttgttttattttgggcggaagaacgtgaaggatgtgttaaaggtggaaccgcgatcgctgtaagattggctaggttgtacaaggttccatgtttcaatctcttcaaagaaagtgtattgaacgatgtgtgtgatacgttagggatcaatatcaaacccccaacgttggattttttatggtaattgaacatgcgcccttacttcgtgaaacatacgaaagatgggctgttaataacgcaataggtgaaaatatgattcatgtacgtagtatcggtgctgacggcgaaactccggttccagtagaaggccgatcccccactctcgcagaacgagcaagagaaattatcaacgatcagaatgctaagatgatcgaacatgcgcgggatacaatcacaaaaggtgttctgaaacacgcgacacaacaaaaccttatctatgatatgaagcacgatatcggctcttgtctgggtattgaatgtactcgctatgcattccaacgagtttctgaatggttggaagaagaagggctaaaattcgatacagaagaaaaacgcaacgccgctaagatcacaaattctctggctagtaagtacaatcaaacgtatcgaaaccaggaagaacgtgaagtgttcggtttcaaaattcctgaaaggaaaacagatcgccgtgtaagtgaattcactttttacattagttggtaaaaaggtgttgacgggggttggttatagtagtattctaactcccgtagacaagacactaactcagaaggataaacatcatggaaatcgtaatgaaagcaacttatgctggatattgcctggaagcaaaaggttttgctaacaatggcaaaggcttacgggccaatgttgaagcaatgctggatgaattacatgcaatgtacgaatatgacaacgtagcgggtagcgttcttatccaggcgttggaagtcaatggtgttgattgtgctggttggtgggatgcttacattgactacaacgataaccgggtttacctgttgagcaacaaagattatttctaaggaaccactatgagcgatgaagctgaggctttagaagattgggctgattttgatgacgaagaagacggggaatatttctgcgttaatcgtggtgcttataaagaccgtttagaactccgtaaacttttatcgggttcctctcaaatatcaggatccaaacgaaaaagtagtaaacaaaaagttcagtatagtgatggttctgtacgtgatgaaactgttgttgctgaattccgtggtcgggttatcacaaaagaaagacaaattgatgtaaagaacttgtatgaagtggctaaggctgctaaaataggttctgtgattgtttgccctgtgtgcaaagaaaaacacacaaagacaacgtatcacaaagttttctgttcgaatggcagaaaaaccagtaaggattgtaagtctaaatatcacaatacaatccatcccgaacgactggatcgggtattttaaaataaacctaaaacgtggagtacgtttatgaacaacaaaactttcgaagaactgaacagcattatcacttccgtagattcctataaggtttctcactggtcgcaatatccaactggctccgaagaggcgctgttttatattgaatctcgtggtggtaaatttgatcaagtagttacggctggctgtaaccgccttgcgcaaatcctatcacgtccggtgactatggaaaacgtagattttgctaatcggttgtacaaaatgcactttgggcgcgaaatcttcaactacaaaggttggaaagaaattgctgaactgggttacatccctcttgaattcagagcgattccggaaggaactccagtagcggttaaaaatccggttgcaactttccacgctgggaaaaatgcgctgtggttagcaggacacgtagaaaccctggcgatcaggggagtatggttcccttcaaccgtagcaactctatcccgcgaatgtaaaaaagtgttgaagaaatatctcaagaaaacctctgatctcgaaggcgaagcatttgatatggtgttacgtacccgtttgcatgacttcggcgcacgtggaacttcttctgctgaatccgctggtattggtggcctcgcgcacctgtataacttcctcggtactgataccgtagaagcgctgattatggctatctctctgtttgaagattgtcagaaagcgtttgatgatggtgaaatggcggctggtatttcaattcctgctcgcgaacattccactaccgtttcttacggcaaagaaaacgaagaccttgcgtacaaaaacagtattgagatcttcggcgaagggatgtatgcatgtgtgtatgattcctgggattttaaagcggcggttcgccgtatcgcagaatataaagattcgattctttctaagggcggtactctggtagttcgtccggattctggtgatatggtagacaatatcatgtacgctcttgaagaactgggccgtatctttggctatacagtgaactcaaaagggtataaagtactacacccagcagtaaggatcattcaaggcgatgaaattcatggccctgaaacaatcaatcgggtgttaaactggatggagtctaaccgttgggcgtctgaaaacatcgcgtttggtatgggcggcggattgcttcaagaagttacccgcgacactcaaaaatatgcgatgaaaatgtgcgcaatcaaaattaacggtgtgtggactggtgtgtataaatgtccaaaaggcgctgaatggaaaaagagtaaaaaagggttgttaatgactatcactgatggtgttaactttaaaaccattgatactctggaacagaaagtgccggaaggctggaaagatgctatgatcacatactatgtcaacggaaagattactgcccgtgacactttagaggaaattaggaaccgtgccgggatttagtatccgcaaaaacgacaaaggaaccgtgattttctatgacaacatgccccttgtagctcgcaaggggctttttgctaaaatcgctgggtattcctttaaactggaagaagtcaacgacgaaacactaaaagagatcgtaagaattgccttacagttaagaggtaagaaagacgaacaaaaagctattgacatgatcaataaattgggtgaaactcaatgcttcatagtgaatcgtggttacaagtacgataccattgcaaaatttgaaaaagggctttgtgaattatgagttattatggtgtgatcccatacacaggaaacaagcaaaagctacttcctgaactgttcaaattatttccagacagaaacagctatatgcgattcattgactgtttttgtggtggtttgagtgtgtcactaaacgtccctaaacccgttctaagcaacgattacgatcggacgttgattgatatgtataagcgccttcaaatgcttcctgacctctctcctgtgcgagaattgattaaacagcatggtctgggtaagaacgagaaagaagcgtatctcacatttcgtgatgcgtataataagaacaaggatcctctatggctctacgttctgatccttcattcgtttagtaatgttaatcgaaccaacgataaaggcgattttaacgccaattttggttgtagaacgttgaatgattctaccgttaaacggtttgaacacttcaaaaataatgttcgggggattgaattctctagcgcatcgtttaaggatcttgatatctgtttgaatgattttgtgtactgcgatccgccgtacctgatcactgatgcagtttataacaaattctggaacgaagaacgcgagcatgaattatatgattttctcgataatttaaactctaatggtatcaagtttggtttatcaaacgtgacacatcatgcaggaaagcaaaatgatatcctgatcgagtggatgcaaaaatataatgtgcataacctcgataaaaagtatctgttaggacagcatactgattcttacgaacaaaataaaacgcaagaagtctacgtgtgcaactaccagaaacgcgacgtaaatacataccctgaaacactggatgacttaatgtaaggtaacatatgtttaagatttttggttatatcccttctgtttacaattgcgctccatgcctgaattctaaacgtctcctggacgcaaaacgaaaagaatatgagtttgtttctgtagccgatgaaaaagatgcagacggcaaaccgatcctgaatgaaacggtcatttctgaactcgaaagcctgttaggtactcgtagactgaccatgcctcaaattttccacgatggtaagcacatcggcggctttgaccaactgcgtgagtacgttcgcaccctgtgataaataatgacaccttactgaatggtgttattatgctgacgaaacgaattaccaaaaaagattacccaacaatcaagcaagctctctttgagaaacaagggggctgctgtgctctgtgcaagcgtcctttagagggcgacattgaaaaacatcacctcgaccatgaccatgctttagacggcgaaaacgccggacgtgtgcgcggcctactgtgtaacctatgtaacggtacagaaggtattgtaaagcacaaattcaaccgatccggtctggtgtcccgtgatgttgactacatcgcctggttagagaatctgcttgcatatctcaagcaagactactccgaaaaccgtattcatgacaaattcataccagataaggtaaaatggttttcaagacttaccaaacctgatatgattgccgaaatggtttctatgggcttcgagtacgccgacaaagacgaacgcaaagccttaaccgcaaaatatagaaagcaattaatgaaggcaacgaaatgaaatatctaaacgctcgattatcaacgcaacagaagaaaaagctgatgatgttgatatcctccactgacaaaaagatcatatctctacatgattggatgcttggaaggggtgactctgatttgtgttatgtcaaaccgaaagaccgaacgatgtttgatgatcgcggtcgcacattgactaatttttctcctatcaccgttattgatatgtgggaactccttgagattgtaggacgggatatacctgttgacggggttgaactgatcaaatatcttaacgagattggacacaatttagatattatccataaggcaacgaaatgaaagtagaaaaacgcgacggtaaaaacgtcgatttcgataaagaaaaaattcgcaacgctgtgtataaagctggcgggactatgacggatgctgatgccgcaatcatgctggttcagtacaatcagatccgcgatggtagcgcaatgaagatcgcccgtatccaggaactcgttgaagaatccctgatgaaaacgaacccagcggtcgcccgtgcatacatcgaatatcgccacgatcgcgatattgcccgtgagcagaaaagtaaactgttcaaagatatctccggcatggtgaatctgtccaacaaagagatcaccaacgaaaacgcgaacaaagacgcaagggtattcccgacacagcgcgatttgctggcgggtattgtggcgaagcatttcgcccgtaatcatatccttccgaaacacatcgtagaagcgcatgattccggtgacatccattatcacgatctggattacagcccgttcaccccttacactaactgctgtctggttgacctgaaaggtatgcttgagaatggtttcaaaatgggtaacgcggatatcgaaccgcctaaatcgatcggtgttgctaccgctctcatggcgcagatcaccgcacagattgcttctcaccagtacggcgggacaacctttgcaaatgtcgatcaggtgctggccccttacgttgaaatgacgtacaacaaacactttaaagatgctgtttggtacggggttcctaaatcaaaacagtatgcgatggaaaaaacagaaaaggatgtattcgatgcgttccagtcatacgaatatgaagtaaacaccttacatactgcaaatggacagacgccttttgtcacaatcactttcggtatgggtactggttggcgcgaacgcatgatccagaaagcgattctgaaaaaccgtattcgtggactgggtaaaaaaggcattacccctgtattcccaaaactggttatgtttatggaaaaagggattaaccttaatccggaagacagaaactatgatattaagaaattggccctggaatgtgcttcaaagcgtatgtatccggatattattagcgcggctaataaccgtcgtattactggctctagcattcctgtatctcctatgggttgtcgtagtttccttagcgtgtggaatgatgagcacggtaatgaaattcttgatggacgtaataacctgggcgttgtgacaatcaaccttcctcgtattgcgattgaagccgaagcacaggaagatgaagacgcgcatgatgcattttggcgtatccttgatgaacgtctggaactgtgctttgaagccctgatgactcgtatcgatagcctacgcggtgttaaagccagtgtagccccgatcctttatacagaaggtgcgtttggtgtaaggttgaaacccgatgatgaaattctggaactgttcaaaaatggacgcagttctatcagtctgggatacatcggattgcatgaaactctgatgcttttcggatctggacaacacccattcgaccggatcggttctcagaacatgggtagactgattctggaatatctacgcgctgcgaccgaagcatggaaaaagaaaaccggatttgggtttagtctgtactcaacccctgctgaatctctatgtcatcgtttctgcaaactggactatgagaaattcggaagtatcaaagggatcacagataaaggctggtacactaacagttttcatctggacgttgaccgcaaggtaacaccgttcgagaaaatcgactatgaagccgattatcattacattgcaactgctggacatatcagctatgtagaattccctgatatgaaaaacaacctggaagcccttgaaaaagtctgggattatgcaatggataaactggactacttcggaactaaccttccggtcgataaatgctttgaatgtggctctgatgatgaatttaagccaacagaagacgggtttcattgtacccattgtgggaaccatgatccggaaaaaatgagcgtcacgcgccgtacatgcggctatttgggtgctcctgctgtccgtgggttcaacgaaggtaagaacaaagaaatgatgcatcgcactaagcatcaaaattaatcaaaaagcccttgacttcggttgagggcttttgttatattgggcctatcgaaaaggagacatattatgaaactgactaagaaaatgaccgatgtagtggcatgtgcgtttgcattaggctacaaagttgaaaatcatccaactcgcgttgaagtcatcaaccctatcaagggccgtcctggtttggttctgtgtgaagacggcacagcatatcgtaatgatgtctctttagaactggcaactactatccgcaccgcaaaacaaatgaaagatgttctcattagcggcgcaaaattgagggctttatgatgtattggacaacagataaatttgtttttcgtgatgatacgtgctttgggactgcataccgaaacttggctattcgtggcggttcgttttcggctaatgatttgtctaaggtagtatttcctattaaagttactgagtatgacgtattcggtgttaaaggatttactgattactttggtacaaagtttgaatcagaatcttacatttttactaatagcgatcgtgaattattcaaaaaacacgttgttgttaaagagaaaccgttattaccaaaagaggatgaagcaaaggaaatctatgatctcctgaacatgcttgacaatctcggtacttgtcatctgttcggtaaacgcgcccgtaaagcgaaagatgttctcaacttgttgcgctctcgccggaattacctgatccgggaagctgaacgcaatctgaaaaattcagaaaaacaggctgaaatccataaatccacccttgctaaattaaaggctttgtgatgtttccgttatacgctaaagtgcgtcgaaatgtcgggaattcatatcaggaatggagtgaatggctacgtgaaacaaagtcattctacatttcaaaagcaactgatatgaaaggccgtaacattcgctatcgtagacccagtggtaaacgagtgaatgggatagattacattgttcttgattcgattcgggatgatatacgataatttaactttgaggcaatattatgattttcaacaaaacaaattcacgtaatttgaactatctacgctgtgaactggaagctaacgaaattgaactgtttttctgtggggctacagatccggaacacaaattgcattgggtatcaggtgagattgtaagcctaaccgatcagattgtcgaagaggctacccgccgcaatgcaatcgttaaaattggtgctattgatgtgaactacgaaggacatccttcatttttcattcaatactatccataaaagtattgacatgtatatctgaatgtagtaacatccttcttgtcaactaaggaggatgttatgaaaatcaaaaacactgctactgaaactctttgcaacgaaattgcagaaatgtactggagtaaaggtcacttagaggctatgaaagagtttcaaaagtggtgtgatacccaaaagttagctaaatgggaatacatcgttattgttgaacggatcaaagaactgatcctcgtgaagaaaggtaacatgaaatgattcaactgaaattagacacaaatgcggtgttaagcctgtttccggaaggttcaaccgctcgcgtagatctccaatctgctatcatcaaaaacgtggtgaatagcgtagttggtaagcgtgttagcgaagaaatcaacaaacggatccaggaacagttagctgttctaatgccgaactcatccgaaattacacagatcatcaaatctgaattctcggattacgtcgaaaaacgttatgggtattccaatgtttttgatgtcaactatggcaatgttcgcgaactgtctggtaaaatcaaagaatcggtaaaacagcaatgccaaaccattcttaaagatatcgagaaagaggcgattgctcatgcaacagaaaacattattgcagacgaagccgcgtttatcgctcgcgtctcgaataacctggaagttactgtacgcaaagcagtaatgcaacgggttaacactcagttcccagacattattgacgaagcgatcagagaacgtctgtttggtgaaaaagcatgaattacgaccgcatctataatatggatgtggtcaacggaaaagggatccgtgttgttttgtttgtgactggatgcaatcataaatgcgaaggttgttataacaaatcgacgtggaatccttgcaacggaacaccgtacacggaagagacagaaaaccatctgatttctctgttgagtaatccgcatgttgatggacttacattaactggcggcgatccgctttaccgtgacaactatcctactatcctaaaactgcttgagcgcgtttctaaggaacttccaaagaaaaacgtatggttatggacaggatataccctggaggctttacaggccgacccagaacgttctaagctacttccttacattgatgttctgattgatggtaagtatgaaaaagatttaccaactaaaaagccgtttcgcggttcagataatcaacgtatgatcgaattcgctaaaaaatcgatagaaattaaaaatatttcttgacctaatgtgtaactatggtaatcttaccacatcgtaaatgacgattaactttaattgagagataatatcatgatcctgaatttcaaaacccgtaaagaagcgcgtaactactgctggaagtggaacattcccctgaaaaccatccgtaatacagggcgcggttcttgtccgtggacagttcaagcaaatgaactgaaaacgttcgtggttggtaaaacttacaaactggttgaccgtgaagggtttactaccaattcacacggtggatctaacaccgcaaacactatccaggcgacacagatcgaaaaattcctgaataacgaggtaaaaattatctcgaaaaccaattcagatactttcaaaattgagcatactccggaaatgacttttagctctctgcgttcgtgggaagctcgttatttcgtcgaagttggcgcggctccggttaagaaaacgaaagctaaaccgaaaaaagccaacgttacggctccggttgcgcctgttgcaccagcaaccgcagatcttgatcaaatgcttgatggcggttcggcaatgtcggttgaactggatccgactaaatttgttgaaggccgttcgtatgttctggttaaaccgcagcaatttaaaaatcgttgtggcgctaaccacgggatcaaatcatataccgatgaacacagtaatggtgtatacaccgtttaccatacgacttcgctcggtcatcatcaattgagcaaaacggtagaaaccattgattcccagaccggaaaagttggttactatctgcttgattctgaacgttcgttcttccgtgaactggcgacaggaattgttgatgaacctgttagcgtttccggtaatagcgctatcgctatcaatgtagacgaagcggctaagaaagaagaaatcgcaaaagcaatggtacagcttgaagaagcggttaaagcccatgaggacgcgcttcaaaatctgcgtactgcttccgacctggttcgcaaagctgctcgaaaagtagcagaagtaagcaagtaaattaaactgggtgctccggcacccttttttatgaggtgacacatggaattattagaaggtaaatcttataccctgaacatcgacgctaaagaatttgcagaaaaaacctggcgaaatgctttagctgaattgatcaaaaacaacggctatattacaatcgatcgtattgcgattggggatactgaggacattgcttatgttctgcaagatgatttcgaatatgagatccctagccatatctggaaatacttcaaaccatatgatttaccggaagaagaaccgaagattgctactaaagaagaaatcgccgcgcctgatttaaatttcgtatcttccgatcctaaaatgtggatgactgtaaaacctgttcaacaagatatcaatgatctgcgatttgattatccttttgtcaagcggattacttcgatttctgtactaccagcgccgactgattcacaggcacttgaatttgcattacagcatgttttcggtgataataagctgtacgcgattgacaaggaagctgctattgatgaacagaaaaaggaaatcatcaaccttctttctctgcatcaacaacttgaagcggtggaattgattgagcgtatgctttctgatacaaagaaagatatcattagcaaaatcactccggcacgaaggaaagcaattgatgaaaatcgagatttacggtattcccgaatcgcttcataaatgttatggttgtattgaagctcggaaattacttgatgagcatggattagaatacgaattttattctgttctaaagccagcaaataacagtgtggggtttgattacgatcggccccgcattgaagagttagcgaaacgtgttcgtagtcgaagcatggcatttacttaccctcggatctttgtagatggtaattttattggtggttatatgcaattgaaagagtatttgggtgaagcatgaataaagaatacattcgcaaagtagcaaacgctattcacgcaacaacgattgattttctggaagggtttgatcatattatccaccctgaaacgctggatagttgggaagccaaactgtttaaaagtatcaatgaacagtttccggaaaaggttaagcgctggtttatcagacaggaaatcgtagcaacgatccttaatgaacgtggtgttgaggcgttcggtgtaacccctctatataaacgaaaccagattacagacgaaacaatcaagaaatataaaaagatggttcggaagtaataaataatcagttaaatggccttcgggccattttttgtatataaatattggtattgaatacaatataggaaaaaagataatggtagctaaatcattccgcgcacgaagtggccttgatgctgctggtgaaaaagttatcaacgttgggaaggctgatcgtaatacgctgagtgacggcgttaacgttgactttttcaatgaatttaacggaatccagcagtatgacccgacccgtggctattctcaagacatggcgatcatttatgcgcgtcgtatctggtacgcaaaacagaatattgcttcccctgctggggctttcgacgaatccaaatggatcgcaactcgtaatgacccgaaatgggtttatagtaacgtaaccactccagacggtagcattattgaatctggtagttacattatggctgatggacgctttactgaacttctgtacctgctgccggataacccgacagagggcgacgtaatcacgtttaaagattgcggtggtttagtaggtgtgaacagtatccttgttaagtctaacacccgtcagatccgtttacgtactgtacaatcagcacagtatagactgactcacccgtacatgatcgcaacgtttatctataacggtaacgtatggcgtgttgctgaaactctggataaccgcgattctgagatcgtgaacgcaaccggaacaggttcattccagttacaatctggtatgacagttttccgtaacagtgctacgggtaaaatcactctccagttgccgaaatatgcaaatgatggtgatgtgatcacaacctatgacgctgataaaatgaactctatcaacgtagccgttttgcagatttatccaggtagtggacacactatttctgacggtgcaattactggtgttacttcggtaactagccagaaatctggctttggtatgttcatctttgatgcacagaatagccaatggaaagtatatgatgctgataatcgtgttcgtctgcgtcgtatctatagtgatttaaacacagttcctaacgattacgtttttgttactgcaaacccttctgggactataccaaacgttacagttacccttccaactgatgttgctgatggtgatcgcgtttacgtatccctttatatgatgggtaaaaaccagaactgtacaatcaaagttaaagatggtacaacggacaagatccgcaccaacaaaaatatgatgcagttcccgcagcgcaaagattatccgcctgatgattggtttagtgtaacttcattagcatttaatgctgctagtgattacctcccgtatatcgagttttcttacctgaaagctacgaaagaatgggttgttgctaattatcgtccgatcgttgaacgtgttgacgcaactaacagatcgcgtactggtgttattgctctggctgcacaggcagaagtaaacaaaaacttggaagacaacccgaacgacgaaactgctattactccgatgacgttagcaaataaaactgctacagaaacccgtcgtggtattgcgcgtttagcaacaactgctgaggttaacaaaatttcaaccgatacctatctggatgatgtgattgttacccctaagaagctgaacgaaagaacagcaactgaaacccgtcgtggactggcagaaatcgcaactcaggcagaaaccaacggaagcaccgatgatattactattgtaacccctaaaaagttgcataaccgtattgcatcgccgaccttgactggtatccttgcccttgttgctactggtggtgctcctaacaccaacacggatcgttctcaggctggtactggggtttatgaccattcagattatcagaaagcggtaacgcctaaaactcttcgtgagtataaagcgactcagttacaatctggtgttgtatggctggcttctgaaaccgaagttattaacggtactgttgcaagttcaaacgttccgaccgttgttactccggaaatgctgcacaagaaaacctctactgatggtcgtattggtttgatcgagattgctacccagacagaaaccaacgcagggactgattacacgcgagcggtaacgcctaaaacgcttaacgatcgtgctgcaacggaaacgctgacaggtatcattgcaattgcaaccgctgccgaagtatcagcaggtactgtaacgaataaagcgatcgtgccgtctaaactgaaaggttatctggacgatacaagccatattactgttgctactgctgacgggttaactcaatctgggactatctggactacggttaacatcggtattaaatcagcaactgaaactcaacgtggtactttacgcgttgctacgcagtctgagacgaacgcagggacattagatacagtatttgtcacccctaagaagttacacgctaagaaagcgactgagagcgcagaaggtatcattcaggtggctacggctgctgaaactaccgctggcaccgttgcaaacaaggctgtttctcctaagaacttgaaaaatacaattcaggttgatacttcatggcaagctaccgatctggtacgcggtactgtgaagctgtctaaggggcttggtacttggtctggtaatgatgtggctggttctactcttccggatgatggttatgccgctgtaggtgttgctgtttctccgtatgaactgaacttaacactgaaacactatctaccgatcggtgctaaagcggttgatgctgataagctggataatctggattcttcccagttcattcgtcgtgatattgatcagacggttaacggggcattgactctaacgaaagaaaccactgtacaggctaacattaactcaaccgccgacgcgagtttccgggtaatgaatgttagtggagatctgaacgttggtgatggctcatcgatgggtaaacttcgtttgaatggcggttcatctaacgactggtcaattcaagcaagttcatcctctgggcgtattgcaatgatctcaacgggtaacactggcacagttcatctttctgtgtataatgatactcgcggcgttgtagctaacgttaaattccaggctcctgaaattcaggcgattggcaaagtgactctgggtaatgatacagtgatcacggctgctggttctgttctctctatgggtacgaacaacaagacaactaagatcctaacttcggacgctggtaacattttggcagaagaatcagggaactcttataaagtctttactgagaagaacgcgcaaaccttgctgaatcctacgtatgtacgtaaagcaggtgatacgatgtctgggcgcttgacggtaagcaacagttcaattatcattgcaggtcaagcggcttggtcaacgctggatgcagtaacagaagcatccaggggcaactggacggctgagatcacagcatcggcacaatacaacttgcttcctggttatgcggttccggttcttgaaccagatccgattaatccagaaatcatgattgtgacccgttatacctatgttaaagcaccgggtactttaacgcagtttggtaacggaactgcattcacttatcagatttgggcacctcgtccgacctctggtactggtgttaatgcgctggcgcaatccttctggatccgtcaaatgaacccaattacgggtaaatttgatggttggggccgcatgtatactagcaacaacccgcctactgctggtgagattggtgcaacgtctgctgttggtactacggttaaaaacatgactgttaccgattggatcaaagttggtaatgttaagatttacccagatccggttactcagacagttaaatttgagtgggtggcataatgtcaaacttaatggcggggttcggccccgattttgtagaaacgcaaattctatcggaaacaaacagcgtaacttacagaataaccgcaaaggcaacacatcccaatgcggttcctaatcagtatgagtttacactaaatcaaaaggcggtagggacaccgcctagtgttgggatcaacgtatggagaattaacaatgctgtagttgatccaattaaaaccttcacattatcgaatgataattcagcaactgcaaacaaagcgtttgttgaatatatggatgctcaaccttctgggctgtatttgataatgactaacggtgaatacaaaacaagccaaatcgttgatgattggtttgctaaaaacagatccgttatgtggcaaggcgctgatttcgctcagagattcccaaattctgcatatgttgcattgtatagggccgcaaaatctcgtatactgattgaatcgttttacgctaacgatggagttttaaaagaagattcacgcgcatcaatcgatcttgtctatgataacgttggtgatgttgggcgaactggtgtacctttccgatctgttgaagatacggaagaatacaattcaaccaatggatctgaatataaagtatatcctgttgcaaacccagtgatctctaaactggctgattatggtatggctcctggattagctatgatgattgctggtgatttttacgccagcaaagcattattggatgctggatcaacaacaagggttactgttcgatggtttacgggtactgctcaaacttcatcatcggtgattgaagttcctgcaaataaacctgatgagtggttacgatttgaacagttctatacgatccctagtggttgtgatggatttaacgttgctgtatctcgttatcctaaacccgctacggatagtttatctgcgatccgtaactttgtgatggttcaggtatctgctgccgaagctgatcaaaactttgctgcacagtttggggttaacggtatcagaatgaacaacatgatcgatggcggaacaccgtatatatttgaattgcctaatactaaggtttatccaggtggtgattattctgcttccgaattccgtgaagttgatgcataaacaaaggcccggaacatcgggccttataaatatgtaaaaaggggttattatggcagatttaaaagctggttctacagtcgggggtttacctatttggcactccggcacatttccgctggttccggttggtaatactctaacctatcgcggatataaggtttatactgaaaacgataaaccgcaagcatcaaataacgacttcgtttctaaagcaagcggcggtcaatatttgggtgtagttgcctttaaacaggggctacaaattaacgctactttcacaggcggaagtgaccagaacggtttatattctggtgatggtgatggtgcgacattatcaaaagccaacattgatcttgtatcatggtatggtattggtattcgttcatcttccggtactaatggtcgcgtattagtcatcaacgctcgaaatggtgatttaaacactcagggtaatatcacggttgaaaaacaaatcagtattacaacctctaaccctactgacgcaagtcatgcaacacgaaaaagttatgttgatggtcagataaatactgtcacaacaaatgctaatagcagggtattacgcgctggcgatactatgacagggctattaactgccccgcaattcgcgagcacaggcgcggcttcccgtcccgaacacgtaccacggctcgaccaggtaattactaaagggactatcatagattttggatcttattaaggtgaaacatggctgatttagcaaaaattcaattcctacgtagcacagttgcggggaaaacacctactacaagtcagcttgcagatggtgaactggcgatcaacatggctgattatgccatttacacgaaaaatggttcttcgatcgttcagttagcgggtaaaggtatcccagaaacaaataccaaaaaattaacagttgatgggcctagtgctcttaatgataccgttaccgtagcggaaggtaaaactattactttcaccaacgcggatttgagcgggggtatggttcgtcatatcactggtaaaaacgctcttaacgatggttggtacatcggttctggcggtgagagtaataaagggtttttagaaatcggtacaattgatgacggtgatgaagagatccgtttcgtttcccgtggttctggtgatactattcgccgtactctgaaacttattgattccggtggtaacactcgcgtacctggcaacatctatattgatgaagctatgggtggcggcggttctgcttttatctctaaaaacaaagcatttttcggggctggcggtgctgatatctatatgcgtaacaccgctggaggttctactaatcagttaacgatcactgatggcggtgaattgctgtttcaagcaaaacctgtatattgggacggtcgtaaaccgactttaaccgaattggggatcgggcggattgaaaacgcgcgtcaaatgcagcaagacaattggcctataactacaggtaatgaaacccgatgggttaaagttgctcttttaaaagatccggcatccggtcagagtcgcttgcaactgatggtgactaacggcggtaactatggttctacacgcggatcgttcgattttatcgattgttctgctcgtagtatgccttcaacattaacggctgcaaatattcgttcttatctgcaaattcgtcgattgggcgatccggcaatggatgacactaaccagatgcgttatagtttggttcgcacatccgaaggtttggaattgtggtttactcaaagatcgttcatcggtagtacaaaaattgctctgttatctacggctggcgtgactgaatattatattcctagtggatatacatcacaaacaaccgctccggatggtttgatcgagagtaagcctattcgtatctatgacgaaatgaacaaacctagccttgacgatggtactgatggtattctgtctgttgctaaaggtggtacaggcgcaagtacagcggctgctgctcgcacaaacttaggtttgggtacggctgcaacccgtgatgtcggtgaatccagcggaaacgtaatggaagttggtgcatttggtcttggtggtacggtaggcgctggaaatattgcaaagggatctttagcagagaccgttaagtatcttaatacatacggaacatgcttctttagggtagaagataacattgctgtactgccccagtattctcctagcatttatgttaaaaccggaagcaatcagttaattctttcagctaaccacagaaacggtgttattagtgtcgtcactacggataaagttgatggtactaatttaacggtatctgaagtatatactacgctgaataagccatcaccggctgatgttaatgctgttgctcgtactggtgatggtatgacaggtgatctgtctattaccaaagcgtctcccggattccatttgaatgctgagagcggaaactcagtaatttggtttaagtataaagggcttgaaactggtgctgtatgggcgttgcctaatactgcctcttctggtgaagttcgcattcgtgccagaacgtcgggtggaacgacaggtggagaattctcgtttaaatctgacggtacatttacatcaccaggtgatgtaaatatcactagcggcgctttcaacggtaaaagtgtcaatactcagtatgcgaactttaataacacaagttcatcctcaaccgagcaaaccgtttctattagtggttcgcagcacactccgctgttactgaatagatcgactaactcgaacttgtctatcggattcaaactttccggaatgaacacgaaacgtttgggtattgatgtaaacggtgatattcgttacggtgaagcagaaaaccaggcaaacaacgcatggctgttgacttcggatacggtaaacagatggattgttaactttgggcgtgatattaacgttgctggtgtggttaattcaactggtggatttactggccctgttactgcatatgatttgactggggtaactcaggatcttaatgctttaacattgaactataccgaaccaggtcatattaaagtttattcgtgccgtagtatgggtggcggtgataacatcaccaataaaccttctggcgtcggtggtaactttattgttatcgttgaatgtatccgtaaagtaagcggtactgattacactaaccgtcaagtattacgcgcatcggacaatagccgcagttgggaacgttggttaactgttagcggtactactaaagcatggacaccgtggagaatgaacgttgttagcggaaacgatgatgatgtatcatttaaatctgttaccacgactacaggaaacctgaacagcggaaatgatctgattgttgctaacaacactcgcgtaggtggcaacttagggttaggtggtgcttcttccacgaaatacgctgataaaggtgttgtgattggcaaaggtagtgctctgttagaaactactgatggtcgtgtgattattggtagttctggtggtggtaatgctgttgaattgcgtcctggtggcccaactcaaaccaacaacttgatcaaagtaactgctaccgctggaagtggtggtgatactgcgatcgagtatgcacaaggcgctaaaattcgtgctaataacggcggtgatttgattatttctgctaaagcaggtcaagcaatttatctgcgaccgcaaggtgatgcatccagcacaaacgaaacccgtattgatgcaaacggtagtatcacgattaacggcaatattaacgccaacggtacattaacttgtactggtggtgctgttaacggcgacttgactgtatcaggaaaagtagatatcactggaagccagttaaagactacatcgctctgggttactggagacgctgctgttaacggtgttttaactgttgatggaagggttagatttaatcaagagttcattgtatcaacttcggttaacgtccagaacactggtaacagtcatttggtcttccgtaaagctgatggtacagaaaaaggacttatttgggctgatgagcctggtagcgttagtataagagcaggtggtgtctctgggccaacgtggaacttctggaacagcggttcttgccaattcccaggtgctattagtaactttaatggtgttaatagtactactaattatcctggtggcggtatcggctcgtttttaaacaccgcaggactagtaactagatttagtaatggtgcttatgcttcgttatatttccaagagtatgtcggaaattatcaccaggctattcttaacgtcaacgggtatggtcaagacaataactttttatttagagctggcggtgattttatctgtcaacgtaacgggtcattcgataacgttgagattcgttctgaccgtagagccaaatcggatatcaaagttattgaaaatgctttggaaaaagttgagtctttaagcggtaatacttatgaacttcataacacttctggcggtactactcgttctgctgggttgattgctcaggaagttcaagaaatcttaccggaagcagttactcaagataatgaagaagatggcggtatgcttcgtctgaattataactcagtaattgcacttctcgttgaatctgttaaagaactttctgccgaagttaaaaatcttaaagcagaaattgaagaacttaaatctaaataatgcatggggcttcggccccatcttttaggagaaataactatggcagtaacagggccgtgggtcggaagttcagcaaaggctgaaactggtgagtcgtggatggctcaagctggggccaaattaagaatagggacaccgttttggatgtctaatatgattggacaaagcgtattccatttaattttcagaattaactatgcacagggttcttctggtgatccatctagatatagaggattctttaaaagagggttatcagtaaatataggagactcggcaaaccaaccaacattaaatgcatttcctggtggtgaagtagggtctttagtagccattacaaacattaaaggcgacccttattgtttgtctattttaaatggggctgatcgacgagttaaagtgtctatatttaatgcatctggtggagaccagtatgatgtttatttcagcggaactaccatgattgatggttggagaagatataggtgtgaaaatgctggaggtctcaatgggtattttgaggctagaatgaataatcagtttggtgctttattagaatacgtttgatagataaaccaacaaactcacactattaaatagattaaaaggctaccatataggtagcctttttgttgcatcctaaatatacctatagtaaactaagaagagtcttataaaatggctgagagaaatcccgtagataaactagccttatttgatagggtaatatcgtttgtgatgggtgtgaaaacatggaaacaattgctgataaaaataattctaataatagttatgtttcttatggtagtaacttggtacaaatggactgatatattcccgatgataaaaggtgcccttgtagtcgatacaagggctatcgaaattgaaagaacagaaaggtttaatcaatccgcgttggaacagttgagcatagttcatcttacttccaacgcggatttttcggcggtactggcattcagaccaaagaacataaactattttgttgacattgtagaatatcagggaaaattaccatcccagatcgatcctaaaaacctcggcggttatccgatcgataaaacatccgaagaatacacgaatcatataaatggcttgtattattcatccactaaagcaagttcctacctaccgacacgtgattttgtgccagtagcttatacttttagttgcccttatttcaatcttgataactactattctggatcggttttgatggaatggtatgcaaagcggcctgatataccagatatgaagataaacatcatatgtggacaggccgcgcgcattttaggtcgagcgaggtgattaacgtaatgctggtgttaaattgtgtgatcttccaatagcccgtttgattgctttaaagaagttcatcaccgggctatttttctcgtaaatatcccaaactttcaatttgtcccacggatccggaacataatcttcattccttgccgaaacccccaatgtaacccgcctgtatccagcgctgtcgtgataatacacgaagaattgcctacctattggcgcaaccttacaacctctcttagcggctctcatagcctcatcgaacgtcatggattcccccaaaaatttctatgcatgaatggtcgaattccgatagtttcactcaaaatgaatatcggatgatctagctcatcgtggttttcttcgtcaatgacgatatcccaatcagtagccttttgttcttctaccgtggcaatgaatacctggtttacttcacacttgcggtgtgtacgtctgatgattgtatccccctcacgaaacacaatcatatcaggattggtagtgcggtacgcggttttacccgcgcacacttcattaagcatatcttcgtatgtcattataaaacctttacacgttgaacgatggtttgtttaacgtctttgtattctccgtgctctttaacggttgctttgaaagtgatttcatcaccttcgtttgcaatgttattaccgaagtaaacaacaacattaccatcaacattaattttggtcatgaatctttctacagaagtgtagtaagaaacttgagtatatcccagtgaaatcactttctcaacggttccggtcatttccagacgttgtttgatttcaccgatgtggttagctttagaaatgcgttcctggcgctcttgttcccactgttcgcggatttcttcgcgtttggcgatataatccttttccagtgcaacacccatgcagtaagcgcacacagcatcgaatacagggctgtttttgttgtcttctttagactggtcagcccaccaaagaacagtaaacattggcatttctgcaattacttcgcctttacgtttgccaatcggcatgatcccttgttccagtagttccagtttttcagtatcgaagactgacagtttaccgcgacgttcgaacagatcgaaatctgcaaagccctggaatatcattttgaaagtatcagtttcagttaaacgggctgaaacacggtcgaaatactcacgcgctttcgcttccgctttctccggatcggtagataagttgcagatatagttatcagaagtataaccgccgcctctacgctcaacacgcaaggtatacattgcatttttacgaccagaagaaatgaagtaagttgtagtaactacggttgcgttagtcatggtatttctccttaaaaggtatctcgtttcgatatggctaatatagcaaaagcccccgaccgaagtcaagggctttttaatcattcattcgaatctttcattgctttatgaagatgaatatcaaaaattttccagtacgcctttccgcgaggataaatttttgctttgtcaatatcgttgttgcttccccatgtattgtttgggccatgacagcgattttttatataatccgtatgccagaataagcgttgaaccgatgattccgtacctaatggatcttctttactgaacagaatttgtgtactcataagaagaacccagtgcgaacaatcagatcgattttcttttctggttcaaacggtgatttgctatcgatgttacactgatagaacataccaacatacttttcaggaatgttagattcaagcgcccatttcaggttgtcatcggtattcggccccaacataaggttaacaacatcaacagcataatcctgctctttggtgttaccggaaccgtttacataatgcccgtgggcggttttgaggatctcaattacttcgctatcgtcggtttcgactttgtaaagcgttgtattttcaggaatttcttcaagaatgatcaaagcggttttcatcacacttacctttgtgtttctgtttacgttttgcttctttaaatgctcgcttgcgatcgcggtgagtagaagcgcggttaatccatgcatgtttcgctaccaaattattcatataagccccttaaagaaaaatatttaggggctttcgcccctgtatcaatccagcagtttgcggatcttgtctgcgatacgtccggcacgggttgcgcttgcagtatgatcgctttcttttgaagccagttccgccagcttacgctgatgttcttcttctgctgcttggcgatctgctgcaacctgtgcaacctgctcattatcgtgagcaatacgcgcttccagttcagacagggttttgtcgaaagttgctacgatttcatctacagaacgaattttattaaacagtttcataatttatctcaattggttagttttaatcagtatacatcaatacggctggaattcaaaatcataaatgtcattcagtgcgcggttccactcggtgtagttttcaccagcaccataacgcatttgaatagcactttcgaacgttgatccgttgaggttcgggaaaccgaacaggtttttgattttgtcatgtgctacataatacagagaagcactttccagcatcgcaaccatcgcagacggttcgtgttcgcggcgcttgatacgtaacagagtacgactagcaccagttttacggcgttgatttggtgctacgtagaaacggaatactacgcgccctgttttatcatcaactaccaggtaaaacccgttttctttcagatccacgccttcgaatttcttgaaggttccgcgtttcatgtcaccaattttaattgcatatttgtgaatgtcaagtcttgtcagaattcttttcatattttttagataccagtttgcctaattttgtaatttcgcctgtttttacgttaacaaacaaggcgatgctcagaaatgggatgctaatcactacgctgatcaatgtaaacagaaaacgtatcacaaaaagaacagcacgttcaagatatcgttgcatccacgcgattcctaaacaactataccctactataaaggtggttgcaacataaaatgcaccaaatcctttacgaaatacgtaacctttcccagattctatccggtcgtcggcccacatttcacgggcagttttcagaatagattcaccactagcgcgagtttcgttagccgaaggcatgtttttaaatttcatgatagtctcctatgcgcccagaactctccaggcgcggttgtttag

SEQ ID NO: 58 - DNA, 176221 bp, unidentified
  source 1..176221: mol_type = genomic DNA
ttagtaatggctaaaaccatatgtaacatcaatcatgactttataacggcatacacgcatttttgcgttattgtaatccactgggatcgctaccacgtcagcaggatccacctttacctgaatgactctaccaacaccgcccccgtagtgtggaaggtatgatttagccgcaacgtgtaggccagtagaacaggtgcgcgttttatcttcgtctaccatgtttcgaggcatggagacagtcacaccaggactattatcaaatttgccagtagcgagatctttatagttatcgcgcacacgtttccaggcaaggaaacaaccatcatcggtcagttcaatgtcattatgtacaaggaacccataaagctggtatacagcatcgcgtgaagggtttcgcatcaaccgttcaaagaagttcaccagatgttcatacggacgatcgttatacatttcgcgaatgattcgttgagtgatatcagaatcaaacactacatctttatatagaagctgatgaccaatgattttaatgttgcctttgctataggttcggatcgcttcttgagtatccaaacaagttacagcacctttgacatcaccagctttcagcatttcatgcgctttcttaaagttcggatgtgtttcacccgccatgaaaacgcgcccttcgtatacaaccgtaatgaacgattcagatccgatcatacgcggtacagtgtctgatactttaggcttttgttttacatcccttttcttagggaattccgctaacttgcggttgataacgcgcccaatggttcgggcgcttacgttgaactgttgggccagtgctgttttacttgcccccgtcaaccatccattatagatagctttctgttgtacttcgtcgagaattttgaccattatttccaccgtattaatttcttaaactcactgagattcttttcgttgttgtaaatcggacgaattgaataagaatcgctatgttcaacaagtgaagccagtaacgggtttagtgatttaaagatttcccatgcctgatcaacacgttttttcatattgctgcgtttaacgcgcattgatgctacggattcacgcagaatcggacaacgcaccctggaaagatttttaccatctttctcatacccttccagacacactatacgttcgagggtatcaacaatcttatacagtttttcattatatcggtttttcacaatccgatcaagcgatacaccgaaacggctatgcaatgcgtctgtttctgttgagtgatccttcccaatccatccaggcaagcaattatctttcaatgccttttcagatttaacatactgcttgcacagcatatcatcaaagcataccagatttgaatccgggatccacttccagaggctgttacgtatagcaaacacaacagggatcccagtatggcgcatgatacgcgataaagtagattctttcattgctgaatccatagacaacccggaattttcaccatctaagcggctatattcatcaataccatacaaccgaacacctggggctttatccagtgataaaaactctgattttatcataaacagagaagtttttgccagattgccgttactatccaactcataacgatatacggtcggggtttttgggcgcggttctgaatttttcggtgcatatagcgcttttgatttttcgcgatctgcatcatagatctctttttcttttgtcatttcactggtacggagatacacaatttccgattcatcaaaatgacctttccgaacgatatcattaacaatctcacgctttgaatcactatcgtaatatgcaacaaagctaacacggcttaggttatgcattttagcatacccgacgatatacggtttaaccgtgttggtatccacttttaacagaatgagtttcttctgtttccacggataataaatgcgtgtgatgtcctggcgtttggttgtttctggcttatacttgctccagcggcctccgctaccagttacctgataccatgcatctttaccgtcgtattcgttcgcccaatacccagcaacataatcatcattatatttgtttggtttgactagttcgctatggatccagccaatagaatcaccattgatgcgaaaattagcatctttaccaacaaagttttgtaccattgaaggcagagaatggaaccacgtcagtttatcacgcacggtttgtaacttatcgaattctgatttaactcgattgaaatatacccggctgatttgtttcagacgttctttaacaatccctactgtcattttatccatactcaactcttcgcgagaaggcatgaaatcaagttcaccgatcgggaagtcaataatatacgtatactggctttctgtatagcaatagaacatcgaggtatcatacaaatctttatccagaggataaatgatgttacccatgcgagcatatacaccgctagtgtatgctgatttatgacggatcaccccgctatcgttggttgcttctttcggctgatagttgattttgagaatagaagcaccaacaaagttaggacgaatatcagtaaatgattcgtatacccttgctgcttcgttttcccattctttgatatcttcaaccttaaccggaacagtgatagtaaccccgttaggttcatcgctttcaatctcatacagaggatcgcagaaaggttccccatcatccatatagattgtgtaaccgcatttgataccgtcttttacggattccaccgtgaaagcatcggaatagcaaagcggagatttgcaacccagacccatagaaccgatcaggtcgtttgaatcatttttagttgattcgaagtaaacggtaaacgcatcactaacgaaatcaggagacataccgatcccgtagtcacgaataacaaaacgaggatcaacagcagttggcaactggacatcaaacgggttctgatttcccgcttctttgtgtccatcgatcgcattacaagacagttcgcgaatgattgcgcggatcttgtatttgtatactgtcgaagaaaggatcttatacgctttcttgtttgcgcgtagagatagtttgtttcgtcccttgctggtatctgtaccaacacggtagatggtttgcggtgtatcttcgcgtaatttcattgtttatttctcacttaacattaaaaataacttggtcacaagagtacttcgttggctttttgttcagaccatattctactacttcgcaataagtgtcaaggaattttaccaatttttcttcctcgacctgctgtttcttcatatcaaggataccccacacgatagccccgataatgatagaaaagaacgcacaaaaaccgaatatggtcagatattttcccaatctaggcgcattataacgtgtcataccttacccctctttgcgaatgtatgcaagttcttcatgggttactggacggatatacagacggccttttgtatatgccttgcgcccgctgatccaaatgtttttcatatccttaacaccgttcatcacatcgttgtaaaacttcttatcagctttagcctgatagacttcacggccttgataatctttcatgaacaaacaataaaggatctcattcttatcaactagattagcatcctttgtagttgttttacttggtgaaggtttcgcacccaggcgcaaggccatagcttgccacactttaccatgttcataaccgcgcccgacaagagcatgagcgatttcgtgtaaaagagtgtctaaaatatcctcgtagatatcttccgcaacatgacgaccagacagttcgatcagttttttagcatagctgcaacggcccagagtttttgtaatacgtccattgatccggaatgtccaaccattactaatcaaaccgtgtttttccatcatggtacgcgcccagtgggttacttccattgcactacgagttttcaacattttagaatctcctttgcttggtacaaaaccaatatagcaaaaagccccctgcattgcaagaggctttgtaattatttcaacttcttagaaagttcttttaaatcattgagatactcaattttaggggttgtttcttcccagtatttcaactgtttacgcaactcttcggcttcatcttccagctttttgctttcgtccgtggttagatggtagatgttcatagccactaacatttcggcatgattctcgcaacctatccacgtagacacaaatttaaccgcttcgctgcgactaaggccacgcagagaatcaggagattctaccatttgagcaataaacgcaacctttgccagtgctttatctaacgcttccttagtctcctggatacgcttattgatgcgctgttgatatacattcatacggatatcaacaaaatcctttagaagcgtttcagggcgttcgtatgagtatagtttaccctcaaagataacgttaatgtttgggtttgagttttcaatcaaaccgaaatctttcaggatcttttcacgggttaacccattagcatactctcgcttgagcgttacttcataccgaaaatcttctttcgatagatccttgtagctaacgataacgcctttttcttccagcttgtcaaggattgcaatgtatttcacacggtcatatttcactgggatctcagtgatcaccaatttggttttaccttgcaattcataggtgccgtaaatcgtaccgtctgtgatttcacctttaaagtaaggatatttcagatccagtgtgaaatctttatcattcagatatgcaatacacccgttaacaactgatttaggatcatgaggcggaatgtttgttgcatatgcttttgcaatcccgctaaacccgttaaccagtaccatcggaatgatcgggagatagtacgctggcggtacatgttccggatcttcatgaactggcgttaaatcaccatccatataaattgctttgaatattggcgatagtttacacttgatgtaacgaggtgcgccaggtttcttaaccaaacgggaaccaaagaacccatcacggtcgaataacggaatgttattgcaccagtgcgccgccataagggataacgcttcttctacagaggtttccccgtggtgatacccatacatagcaacaccgccagcgatagaagctactttctgaaatcccgttccgccctgcatagcagagtgaataaagaaacggtgaacgggtttaaacccgtctaccaggtgcgggatcgcacgtgaataaatcgtgtaaagggcaaacgttagcccttccacctgtacaacatctttaatacttctttccattagtcaaccttagaaaatttgtgttttccattaacccaatctttacgcggatcagattcgtcgccgaagcatagttctaacacttctttgtattcgtcgtcaagtacaatgacatcatacttcaactgatcacccagaacacggtcgtaatcttctttgcgtaaagaacccagccccttgatatatcgtacatcttttgctttatcgcggaacggtgcaaactcatcaagagaatagaaccatttttcctcgcgcccaactttagcgataacgatcggggttcgaatatatcggatccgtttctcagtgaacaaagaaggccaacggctaaagaatgcaagcaacagagttaaaatgtcaccaccgtcaacgtcagcatcgaccatgatgccgatattatcataagtcattccggaagtatcaccaggatgaatattgaggatagccattagctcaaacagttctttgtttttgataatgtctgtaaaactcataccccatgtattcagaggcttaccacgtagcgggaaagcgccttgtgtttcttcgttacggcattcgatgaactgaccaacagcggaatcaccttctgtcagaaacaatgttgtttctacccctggagtatcgataccggaagccggaacgtgtttagcaatctttgcctttttcgctttctttttcgctttggtgatcgcggcggcttctgctgcttgtttacgaatcaatgcggattcaatgatcggagtaatgatttctggagtatccataatcatttttgcgatctttttgtaattcaaattcgcatgattgttaaactcacctgctgtatttgccaatcgctcttttgtttggctatcgaatgcaggtgcattaaagttatgcaggaataccacaagagttaagcattcttttacacgtgctttcgggatctcgatactatgctttttcttgatcatcggttcaagttcagaatagataccatcgatcatacactcaacatgaacaccgccatttttcgtatccagaccgttaacaaaggatttctgtttaaacccgtcctcagtgctcgccagaatgaagctgaggcgattatttgtctggacaatggttttatccccatacatggaagcgtacagcgggaagcgattagagagcgtttcgccgttatatgtgaatttcacggacgggaaagcaacggcaagggccattaagcgatccttaatcacttctttggtttcttcatcgataccagttacaccaaacatagagaagtctggagtaaacttaacagtagtaccctgttctttactggggctggttcggtaatcgatgttctgtgcgccgtccgtacagttaatggttactttgcgtttcccgtttgcagtctcgccaataaaaatcgagctataacagtttgtcaggaaagaaccaacaccattcatacccatcgttacgcggtttttatcatcgaagttagaacccgattttgccatagtccatgccgcaactggtttaggaactattttcccatctggggtttttacatcatcctggggaataccgcgcccgttatcagagattttaaccagattatgatcaatggttacatcaatcttattagcatgtttgaattcagttcggatcgcttcatcaatcgagttatcaaggatttcgttgatgattttaaccaacccttccacgtactcaaccttgcgatattggcccattatgaaacgttcatgcgcttctttgttaaccgatccgacgtacatatttggacgcaaccgaatatgatcgcgatcgctcatacaaaatgattcgtcaacctttgcgccttttttggctggttgtggtttctgttctggttcatcatctgccagaagaaaatctaaactcatattcacctctttgtttaatcactgacattatatagggttctatgaaaaagaaaacccctttcggggtttacttgttataagggaaaccatcacgaaccatttgaggtttatcaaccgttcgttttgcttcgcctccgcaatcacaatctttcggtgcatcacgggtagcaatgcttgccatttttggaaattctttattacacttggtgcatttataggtataggtaggcattaataaatctcttttaaactcaacatcttaactaaacgggctttgtctatgtcaaaaacacattgacgtgcgcccggatacaacttttcaacttcgtataccatgcagacgaaaccaacattgtgcatgtactcgcgttcatatgcattgaaccaacgagaaaggcgctgtattgactgaaacccaaaatataacccagccgcttgaaagtctatgttatctttttcaaggttgcgcatcaatcgattatcgtcatccggcgctggatgtcggtgatcatccatatcaatatagatatcaggattcatacagaattgatcaagccattcagcggtatccatcgacaaataacgattgacatatgggccactttttgtttgccatttttctgtacaatcattccagaaagaacaagaaaattccacacgatatacgaacatgatataatcctcacaagtaaactcaaggtttacaagtacgataccacttatctaatttttctgcaagcatttcgttgataatttttgcaatttcgtaccgtccgtgagtagtacccagttccaggtaaatcacatcaagtgcgcacacaatcgcatcaatactttcttcaacgatattaccgccgcgttgaggctgaatgagacattcgctgatctcgccaacttccgctgataggtgatgaaccacatcactcttcgtgcgtttcttcactttatgtgcaatttcgaaaaacttatcaagtacgatcgtcgtttcttctcgcgttgcggtattctcggatgttgaagccgtgtgttgaacaacatatttcgtaaaatagccttcaaacacgttgaaagggatcacatgaggaacaccattcaaaaacaccccttctttacaaacataatggatttggcgcggaatagacaaaccgccgctgcgttccaaatgccgtttaacgcttgctacaaaatcaaattctttcccgtatccatccaatctactgttataagtgagtagaccaaaagtaggaacatatagatcattttctttatacagattcatttacaatacctttatggtagccaaaaatataacaatcaatcgaaggacgttcaccagggaagtgaatgcattgcatgatgcgttcagccattagatcttctcccatgtataccgaagtagtttcttcgttgtaatgggtatcatacgacgttttaagcgtcatgcccggaagccctgcaatgtgcatgaatttagaattggtgcaaggttttcctacttcaccgttaaccatcaacactgcattagttttacgtgcttttctcatttgaatttcaccccgatttgagatacgttccattcttttacgtcatcaacaatatcataatggttgatgtatggtaaagcaatttttaaattactcgcgtcttgaatgttgcgtaagaaacgagtaggagaaagaagacacaacctctcggatccgttgtttcctttagcggcaaatgatagggtttctcccccgtcaatcttcatatcaacagaaatcgttttgaattctggtgcgtatgacgtgattttgccgttgtctctcggtgtactatagaaacatacactttgtgggacattataacggtctgtttcaatgtacatgtaatcgccgtcagacattccccacacggtgtagagggatccggtatagtcaccaaaggaatttttaaaatcttccttcgtggtgtatcccagagagcgcaattgcataagctggttatgctgttcgattgcatcggctttttgttgttcctgtacttgcgcatcaatcgtttcttgccaggaattatacgcatagtaacccacaacagcgattacagccataacccctacagctttccagattttagagtcttcgtttttgttactcatgctatattccttttaagaaaaagggccgaagcccctttgttaacgaagataaaccacataaccgctttggtcaatcgcgcggtctgcgtcattgaagatattaccacgaatgccttttgctggtgctttccagcttgcaggtttcaggatattaccatcattatcgatgaaagcggcaacagaacgctgattgaacatttcaccagtttctttgttgcgagtatcctgaacaacgcgatgatatttgcggcctttctccagaaagaaaacagtttcgaaaggagaatcttggaaacgagcgttacgcgctttgtacattgcttccatgaaaggggctgctttttctgcgaggatttcgaaagtgttcatggtatatctcctaaagtgtgtttcgtttcgatgtaagtactatatcaaagatggttattctatgcaaggcttttttcgttatccatcaaatattttaagtgttcttttaatgcagggagttcgttcaaatggcgttgcttaactttcttgtactctttgcgttcccagttttcaagattgcttgccaacgcttcatcacaataagcgatcccgcgttctgcatcctgaactttccgtttccattgtgcaactgcttgttgataaagagaaccgttaaccatcataataatttcctcccttgtttcgatggggtaactataccaaagctaccccagaatgttttaacaaaaagtgctattagtaggtatccagtttatacattttgcaccagttcatgaattcttcgaaagtctgagtattaacacgtttttccttcttcactttcttagtgattacaggacggttagtaaaacgtttttgcattttcacagtgattgctactttatcgcccaggtcttcaaccttttcaaccagcgcccactgagaaccaatttcagcgccgaaagtcaaaccaacaatctcacctgctttaacgtgtgctgcatattttactttaaccattttcgtattcctttctctgtttcgtttcgatgaatacaagataccaaaaagcctcccgcaatgcaagaggcttctttaacaaaaaatgctattttatttctttgagtaatttacggatcccgccgccctgtgtcttatcaaagattttctttgcatcaataacagaagtgattatgtggtagttgttaccttttccgtcaaactcaaactcgaccttgtagtcactacgaaatttcacaaaaacaaattcacctgcaaagtgcttacggaactgtttttcgttaatgtccaaccattcctgtgtatcatctaactgatacatgcgacaaaacaggatcgaacccattacaacaatcatgacaaggatagctaacgcgaattctgacatcatttacccctgtttactgattgacggtgtaacgatttaggcacaaccggatttcgatacggtttgactttatggatcatgggttcttcctcaaccaaattaggaaattggttgttccattccatcgaaaacggataaggttgtgacttgaactcttcgatcacacagtttactaaacggtcgccgattacacccaaagccgccccaataatcgctatacgcataaatcaccccttaattgtgtcaagtacagtaaaccagtcatgaagccatatcgttgttcttaccgcgatatacgttaacaaactaatcaatgataccgctccgcaaatagccagcgtaatcaacagccggatttcaaatttagtaaaattcatatcaatctcctttcttagaacccaatataacaaaagccctcaaccgaagtcaagggctttgttttaaatttttaccagttttggtaatcgaagaactataccaggatggatcagacgtgcatccggaatagcatcacggttgattttagcgatatcaggccaaagttcaccaacaccatacagtttctttgctatagaatataggctatcgcctggttgcacgacatagcgatcagattcaatcttaaccagatcctggttaatgatatcatcaaaggcttttgctttcgcttcgttaatcgtgttcccgtagtaatggcgatccataatagttaatgtgatcatcgtttctttcctatgctgttttcgtctgtctcttctaaggatggaggttcttccagccccagggcataacgtttagcatagattagcatcaatgcatctttagcgcaatcatgaatcgaatcatgctgaatgaatccatctaacatgcctttacgcagtggacacgtggtcactccgcgagtcagtaaacggttttcaatagctgtacgcacatcacggctattccagaacacggtcggcatatcttcaaacgtgtcaagtttccctgtcatagttcgtacaacatcggttagcatagaacgatcgaattcagggccgcgcgtataatcgtatgactgccaacgactcacaccgtcagccgctaaatcagcaaagaattgtcgatgaccttcgtacaaatccatgtcgatatcggaagggaacaaaaccctttgcgcttctttagattgctgtttccaccattcgatcgttttttcatctttgatgcgttctggttgtttccggatgtcaaatttgtactttcttcctttagcaatcagttcctgaaaggtaggcggatcataaggatcatcaacaaaaggaacatagctaagttcagctagttttccttttggaaacgggccaatactttcataatcaaatacgaaatctacgggtaaatgactcattcgcgaccccgcttatacgattccatgaaataggccaatgatagcgcgacttccggagtaacatcaacggattcgatcatgcctggagttaccgccatcataccgaactgacgaagcccacaacgagcaatcgatttttccagtcggatcatgttttctacagcctctgcaaaattgtccagatgttcccaatcgtggtaatcttccattgtagaccgatcacttttcaaaatcagatcggcaactaattcagcataaaggcgcggaaggtgaatattcatttaaaatccctcaagcatgtgtttgttttcacgaatgttacgacccattttcaaagtatcaatgatcactgcatactcttcaaaagtgaattcgatatcttgtgaaatgtttccccacgtgtaggtcggcccgttaggacagtataacccaacttctttgtttgcgttgacaacgcagcgcaattttgcaaacaacaaattgatatcgatagaattgaacccttcgagataatcaagcccctctctaccaatacggtcaacttctcgcaaaatcttttctacatctttgactttaacaataattttcataataacctcaaagggccgaagcccttagacataatcaacagtgaatcgtgcgcgggtagttcctacataaagcaactgcttacacaattcataatcggcgtatgcgtatgcatcgcgcgtatacatgtatgaatgatcatacgtgcttccctggcctttgtgatacgtacaaaccggaagtgccttaaccgtctggaacttgtttttgatttgccagaacgaataccagggggctttgtatccagtttcctgtttcatcttcttatactgaaacgcgacgtagttcaaataatcgcctaaacgttcctgcataaccggatccgcaataacctgaatatccgctttcgtatcctcgaacatcgattctgttttcatcaagaaataatcgatttgtaccggatcgcatcggtcagctttgatagtatcagaacgcggtatgatttcaaggattttaatttgctcgttgttgttatagataacttcaacaaacgaaaccccattcacacggccttctgtcactaacggttcttgcatcacaaccacttcaccaacaatgaacggctgatcagttttgtacaagtgtttgcggatcactgcgtttaacttgtctacgtttgcgttagtgtaagcaaacatacggttattattcaggtcatccggagtcttaacacggctaaaataacgtctcaggaagtcactagcgttttcgtgcttcattacccctagttcaccattcatgaggggcattaacggcttaccgtcgcgtatagcgcgtgatacctggatgattgggtttccttctgcctgacgcataatcttatccatgcgaatgacatcaaaaatttcctcatcaaagaacggtgaaagctcggtgatcccttctgtattaaccggacggatctgatccttatcacccaatcccaggatcaccgcacaactcggaatagtacgcttgatgatacggaatagttctttgtcaaccatcgatacttcttcaaccacaaacacacgacattcagacagatcagcggcttttttgcctttttgctgttcaaatactcgtaactcttcgttggttacggggctgattttcagtgctgagtgaatggtcgttgcatccatacccaccgcctcagagagaacgtttttagcctggtgcgtcggtgctgtcaaccagatcccactaatacccagttttttcaatgtttcaaacacaaattttaccagagtagttttaccaacacccggcccacctgtgatagtagtatggattttgtttctgatatttttaatcactcgatcatgtgcatttttctggtcttcgctcagatcgtcaaaagttaattcgctcatactttaatcaataccccttgaatacttgcgtgttcaataaaccaacgcatatctttctttttcttttcggttacggtttcaacttcttcctttcgaaagaatcggctaagaccactttgtttaactggattcatcttatcatgatattctttgataatcgaatttttatactcgttagcatcgtccggagatagaaacaacaaaggtgttaactctccttccttaatgaagggaattttaaacccgtctttatccttactaacgacgatataatattttgtaatcattctcgcccctcataacaaacgtagaatattccaacaaaccaaaacactgatagtataatcagtaaaagttttctttcaacgccatttacgtgaaacacacaccaaccgaaaagatatgtgatcatcgcgcaaacaccataagaaagaaccccaacagctactagcgcgatgatcggatccattagtagttgttagcccaacggcggaggttttcggcttgtttaagagcgtacatcttataaattgtttctgcatccatacccaatgcaataaacttacatagtacaaagtggaattggtcgatcatttcaaacagaacttctaaacgatcctcttcactcagatccgcaaatttagtattgcgcaattcctggtgatttgctttccacggtttccaaacaccggatgcaggtttaacaccgcgagacattccacccagagcggtgtaaagttcgcgggtttcgtctgcgatcgcgtcatcttgcagtttcagccaatcaaggatttctccgcaagtttccagattatctggacgcggaacccaatgcagcgtatcagacaggatttgttgtgcatggttttgtaaatccagcatggattgtaaaggatcgccattacgggccagaaccttttgatattcggaatctacaaattccagatcttccgggttaaccaggtgcgcacatgaattaaatacaggagttttatcagtagtcatatcaatctcattttttcggtgatttgtcccacgacttaaatcgaagttttgccgtgagtccagaaacagtattatctttcaaatactgcataatttcaagtttagttgcgccgtccgtttttatcatttcgttgatatctttggaaggccacgggcatttatcccacattacaaccttttctccagcctcaatcaatttaaagaggcggtgagtagtatccggatgacgtgcttcattgtcaagaacccagacacgcatatttttgtacggaacctcagaaagcgcaagctgtccaccagtgatagcgccagcattatcaacaaataggctatctaatggcccctcaagaagataaaccgtttttaacggatctatcgtatcctgtccgtaaatcttggttgattcctcacaggctttgattgtgatatatttcgactttgcaccgtcacgtaaagcacggccctggaaagattctattttacctttcttatcgaagatagggatcactaatctcggttctggttttgcgatcggataggtatccggattcaccgtattaaccagttgttgccattcgcgagtaaaccacaaccgatcccacttgtcacgggggatacaacgattctgcacatattttatgatcggatgttcatccggcaaggtatctaacctttcgcagaattgaagagtaggaataaatttcttctcttccttcggttgttctgtatgcgttggctttaacgaattgcgatccttaaacgattccatgagataatcacggtaatcgtctggataatattctttcaggaatacgctaaacggtacaccataaccacagttaaaacaaccacaattcatatgatcaccctttttagaagggtagatccaaaatcgttttttgtacttgtctttcattgagtcgccgcaaataggacaacgcgcattgatgcttaatgcccccgatttacgaacgatttcgctttgaggcaatgatcccatgattcgggttgcaaattctatatcaagatacatttcttacctcagttgactatctttagatcctcgtcgattataccccgcgctgatcatttcgtcatgttctttttggcattcaatacaataacggcaacccttcacgatagccctacgtttttcgggtatcggatccccacaatcaaaacaatgcgttaatgattctccgtttctgatttgagaacgtgcaaaatctatcgcattgtctattgttgcctgaatggtatcttgaacaccgtcagcagggccaaatccaaccgccattgtaaatcctcctaatcaaatgatttcaatatcatagactaagaggatttttctgtcaagaacttacttgcttttctgttccgtcaagcattaacttccaaccacgaaacgcctgtttaaacgaataatttattgcaatatcaattttatcagaaccttttcgacgattctgataaacggtcgcgttgtcactcatatacatgatacaaattggaaaccatgtataatcgttagcagtagcccagatagtgatattcagcggaggaattatcatttctttttccttttccctgcacgggtaacgcccaatactttcggcccgatgttggttactgctccagtagtcacaccagaagcaatcttttctgtatcgccgccagaatcacccgcgaccatatcctctaacatgcgccccttatcataatattctttgaggcgtggaacgttcaacatgatttcttcatgctcttgttctgtcagattgtagcgattgcgtagggtatcatatgaactggttaagttcataaacccactcatatacggaacagcattcattctacgcttgatatggcgtactgaacgatgaaaaggagaatacgcttctaactcttcttttgttttggggttgcgaattacttcgccttgtccatcaaggatccccagtttataagcagaccactctgtgaatggttttttgagtagccggatcatccggacgctatatgttaaatccatatttttaactaattgatcactcatgattattactctattgtgaaagtgaataaatcagatttggtttcaggttcaaactccatacaaacaacctcgcatagtggtttaacccctttccaatcctccaggtaatacccagtatctataccgcatccaggattcataacaaggccagtttcatcaagaaactttttgcatttacttgatgtggtgctgtcatcttgtcggaaacagtgtgttttcgaataccggaaatttgcagacatttgagggattatgaaagttccctgacgcgcgatctgtgatgcacgttcgattactttatactcaaattctgcccctgtatacttacccttaaaatcagaggttttgattttaccaaaaggcgggttactgatcgccatatcaaacacctgattaaattcagttgttaaggcgtctccatgcacccaggaggcttctggtacgatacgcttacctaactcatagtatgtgtgatttaactcaacacagacgatttcgcgcggcgtattgtacatcatgtaatgaaccatagcgaaagataacccaccgataccagcacacaggtcaataacacttccacctgtgcaagcatcgattgtgaaatcgcgagcaagtccaataggggtaaagaacgcccctaattcagaattgtttgtaaacgcgccttcatgaaagttttcaataatgaacaacttctcttcgtaagttagcgcaccagatccattatctgattgtgtttcttagtctcttgctttgtcaattttgccattaacatcaccaaaattcaattttgcaaaatctccatgaagttctttagcttttgcatcgtacaacaatgcagcaccttccatagtatcagaaagacctatatacatctgttttccgtttgaacggatatcagcgcggaatttatttccatgtctttgtacgccgatataaggaatatctttccttttagaaacctttcgatttcttgaattttctggaagagtacattccctaagattgtctattccatttccagcttcaataccttttatgtgatcgacatactcaggaagtataccataatggatataataaacaattctatgaacaagatattgcttccttttatatgttacaacatgatacccatctgcgtttttatgtccagcaacattcccttttcttgctcgttgtcccacatctgcgttccataaaacatcaccagtgaagacattaacacacagaagaggtaataactcaattattccttctagttcttccttaatggtgcgttttgtcatttcaaaccctctttaacaccctctttcatagctttccaggtagaacctgcttcaccattcagggcggcaaatacaaataataagatagcaaggacaagattcacgccagcaatcaccatgattttgctatacacgaaaatgtaaggcattgccaccacccaccaactaaaagaattaccagttacgatgttgagtgctgcaagtaagaaagtgataacgaatgcgattttcataatgtcctcctttgttatgattaaggtatcatcttttttgaaagaatgcaatacctatagatacaaaaagccccgaaaggggcttaattttttatgcgttattgatgagataccgaagaacgtttttcgcttgttcctcattacaaccaactttgaaaccaggttcgatagggaggaagttccagaggaaatcaacacttccttcaacgtcatctttgcctttttccagcatcgctaacagcaaacctttgtttttgatgctgtttacgattgcgtcaaaataaccatcgctgaaatcaacattcgggttcagcatttcgttgtaagggttgttgaatacgttcattttgaatctcctttgtttaactcagtatcttgtctacgtgagttatattaccacaatggagattcaggtcaatacctttttacgattttttgaaaagtttttcgtatttggcttttacccagcgatacatatcttcggccttgtcactggcaagcagtgagaacagcagatagatcgcagcacccaccaacacaacgcctactacaatgtagacgggtaagagaactgggaagagaacccagaaccatgacatttgcgagaagccaaacactttagcggctgcaaaaatcagagttagtccagtcagcagtttgatagccggaataggaatcgttatagtcttagtcatttcattaccttacattctttatggggctattcgccccagtcaattaaaattgaatgtcagattttgcaatctgtgtcattttatcacgtcgggtagattcagcctgtttaatcatcgggccttgtgtctgttctactgttttaggcatagtgttgccgtggtagtcagatttaaacccgtattcgctgttgtcggtatccatccagcgctgattaccctttcgaacttccaacttgaacttgttgaaagtgttcttatcgccataacgggatttgatttgcttgaacagttgcataccctgatcagctaactcttccgtctcgattacagctaacataaaatcagccgtagcaggtaaaccagcggattccgcaacatcacccatactcacatccgaactatcccatgcagaacgcccaacctgtgcgcctgtccacattacggtattagtttcaacagcaagaccgcgtagttcttcggcaattgctttaaccagaatataggtattctcagcacctttaacacgggttgaagtacagatccccaggtaatcgacaatgatcacatccggaacaaactgtttcttcaatttaagctctttcacaagcgctctaaagtggtttgcacctgcacccgatgtagggtactgcttgaccaccaaacgcccaaccttacccgctttaaggcgctccattttgttcttatagtctgcgtatgtaatgttaccttcgtcgatgtcatccatagtcacatcaagaaggttagcatcgatacgcttagagcaaacatgctctgccatttccatagaaatgtaaagaacgtttttaccctgttgcagataatcagccgcaagagaacataaacccagtgatttaccaacgttaacaccagccatgatgatattcagtgtaccacgttccgcgccgcctttggtgattgcgttcaggatcgggataccaaacggaattttcatcgccttcgattggtaaagcatccaccgtttttcataatcttcgaaatagtcatgacctaccgaactatcgaatgaaattgctaatgcttcctccatgatttcagggatagccccaacaccaggaagtttcttgttctgttctgccagtggtttttctgcgttcgcctggatttcgattgcacgagaaagagcacgatacattgctttatctttgcaatatgtttccgtttccttcattagccaatctaaatcttctggcgcatttttcagcgactgaatcgcctttttcgtgtcttcgtagactacatcacttagatttcgtttgtcaagcgcaacctctaaagcagtttttgacggaatgccgttgaattcctgtacatgtttatcaatgaggtcaaacaaaacttgcgcattgccttcgaaatattcctttttcagatggggccatgcttggacaaaatatgtcccgttataaatcaggttagaaaatattgtatcaacgatcattgtattgccttataccaggttactgaacatcatgaaaaagttgtaaaccttttgtttgaatacatcccataatgtcagtttaggctttgggacaactgaacccttttcaagctctttaatctgtgcataaattgcatcatgcaccagcgggatcaacgcttctttgtcttcgtctggggtactaaattctactttcagaccatgatcccaaaacaccttatgaatataaaccagatgcgcaacacctttttcatcgttaatcagaagttcctgaataacatctttcatcgcttcatcaatataattctttgctttgctctcgatatccatacattgcctcggttatggggccgaagccccatagtttttataaaatttcgttgtcttcttcgatatcatcaaatgattctgggatatcgtcatcatccagatcaggatctgggatgctatcagtgctgtataaatcttccagcgcggaaccatcactgatttcacgatcagggatcttatacttttcttcgatagctttcaagaatggttgatgagtaaacagaggacgccagaattcaacgctatttgtttctgactcacgccatttcttttcttcaacttcgagttcgccagtctcggtattcaggaaagcacggttgcgccagcctttggttacggtctgtacaaagttcatttccattgccagatccagaaggccagaatacatactaataccgccttcataggtaacatgcagcgggaattttgatttctctttcacgaatcgagatttttcgatattcatgatgaaatcataacccaccacctcagtaccttctttcacctgttgtttacccaggatgatcgcagtatcagcggaatacattaaaccagtaccaccggaaataactttcttgctgtacatttcttgtgtgtcatatgtatgacagatacaaaccatcgggatatccaggtcagccagataaggcgtaaccatacggaacataccttttaatgcttttgctcgcgtcatatcctgtttatcgttatcagacagcgcgtcagcaagttcttttttacttgccgtgttgcctactgagtcaacgaatacaatcaccttatcaccgcgttcaagcgcgttaagctggcttacaacgtcattacgcaactgctcgaccgtcgtgatacgagtatacacaacacgatccggatcaacacccattgatttcagataggatttagtaacacctttttctgaatcgtagaacaggcacacagcatcttcatacgttttgagataagccgctacagtcagcaaacctaagttggatttgaagtgtttggacgggccagcgaaaagggtaagaccagaagttaggccaccgttaaacgcaccggacaacgccagattcagaatcggcacacgggttcgcgtgatggtaatattgttgaatacgtcgctttcagaaagtacagatgcagtttggctattcgagtttttgatcagtttttttagtagtgctttgtttgacatttaatttttccgatttattcattgtcattctatatatctcactagttaatgaaaggggccgaagcccctagagtttaccagtcaccgaacagatcgtttaaactggcacgtttttcataatcaattttacatacttctgtgatgttagtcaatggactaataacatgtttttcaaacatacccggataatctacccatgccagaatatcactttcgatctctgctggtagtctatttccagattgccacgcgatgcaatcagcttgccacgggtttttatcccttaatggtagaaccattaccttttcaccttccatgattggtgtaacaccatcaataccagcagtgaaacggttaaagaacaacacccctttaatatggtttggtgttcccttgattggatagccagccccatcacgatatttcgaaatgttgttggcagatgatacaccagcaatttccctgtagtcaagttccttatattcttcttcgaactttttataatgttcgtgtaaagataattcaccttcttgcaggatacggcggatcgcttctttcaggaatactttcacagaggtcggagtactcgaacgctgtgtttccatacccatgattttcaatttcggtttttcatagcgagttccttcggagtcccacacgttagccgcatatcgttttttagcagtccagaaacttcccaacccttcggaacccaacggaggcccagaaatgatttcacgatccataaacatcaggtgttccacgttgttcatgtattcgcaaagttcacgataccctttatcgatcattggttccattctttctttagcaaagcgatccaggaagtcaacccaatggttattatccttaaatttagcctcaccaccaacttttgcaatcacgttatccatacaaacataaatggagtcagtatcacagtatcgaacatatgcatgatccgtagtaccgcacaggtcgttaagatattcgtttaccttacgttcaatccactggatagccaactgcccgaacatggtgatcgcgctggcgtttcgtagatcgaagtatcggaagtgttcgttacccaacgcaccataaagggagttgatagaaatcttacggttaagctgtgctgtgttcgcttgtgcgatcttcttctcacatacgcgcttaactgctttaagcatttgttttgtaagagttttcagaactgctttcgattcatcactgaaatctgtatagaaatcaaagtcaggatcaatcatttggttatgcgcgtctgttaagtgttcgagttcgtgcttgatgagttcaagatttcgctcacccgccatcattcgttttttccacatcttacgctgatcaaatactttcttgatctctactgggatcacgcctttgatatcacggcggaacatccacccgttaggagaacagctaaattcatcgctagggcgcggcgcggtcttattaatatactcttcaagagcacgtaccgcaaaacttcccataatcgtttcagggcttatattcacctgtcggatgatggaagggtacaggcttgttaagtcaaacgataccatgtatttgtaaggcccaggaactggatccttcacaaatgccccagggtaaggggttttagtatggcgtctgttttccggaataacaaccttatcttcacgcagagagttataaatgatcgcgtcccacgttttcagcggagacataacccctgggaagttaatttttgcatagtacgctacagacagaaccagttcaataaagtttcgtttaccgtcgatatcaagtacgcggataacgtcaacaatgttgtacgtgatgtacagttggtgatcgcgctggcgtagttcagacagggaaccttcatactcaactttatttttaccagtttcgtattccgcgatcgcgtccaggcggtaagatggttgcggggtaaagctgaatttcttatacagcgccataccatccatttgagcaacgccggaaatatcatatcctaattgttcgttgccgtaagcgtcagtagtggttctggcggttactttaccaaatgggctaaaatgccttaccacgttttgaccgaaaatgttcaggtatcgcgtgatgatatatgcaatatcgaatttgtcagagttccatccggttacaataacaggggttcgctctttccaatctttgatatacgcagacaataacgacttctcggtctggaaagaccgataaacaattttgtttaaatcttcttcgctaatgtctttgcgatcaacgttttccgcgcaccattccgcaaggccaccctcaaccagatcgtatacatagaatttatcttcaatgctatcgtaatgggtaatcgcatcgattggatattttgcttcacgcggatccggaaattctggggcggtcacctcgatatcgatagaagcaatgcgaatgtgttcgcggttgtattcgatttcattccggtacatgtcagaaatgtaagccagtcgataatcgtccatacctagcgcttccatcccaacatcgcgcatacgctgcatccagtttttagcttctttgatgctgtcaaactgttttttgaggcaaggcttgccataaatgtctttgtatggggtttctacgccattcatagcgtgttgatacattacgggcgcatatttcgtcttacgtacctgttcggtgccgttagagtcaacgaagcgctcgtaaatggtatctcccatttgttcaactgataggtaaaattcattcattggatcttgtcttctccattaatataatgttccattgtaacaccacctacagcaaattcaagtttactcgatgttctaaaaccaacaacccttctgctaacaagtcacggatctttctcagttgaacaagctggcgttcaagtttaaacccgtcgaataacatgctaaaaatactggaattgatactatgatattttgcttctgcaatgccctgattaaccatcatgatagctttgttaaccagtagtttcctttccgttactgtatgttcatccagttgacaggttgcaagggaaaccagatcatcataagcacgttgatcaataacgttatccatacgggccgcgaaaattttattcatgtaagtgcggatcattgcgcgacctccattcttttcataaagacttcttttgcttgttggatcaagtccagagattttttaatacgctcatagaaatgagtggtttcaacttgattgcataacaatgtgtactctgaaatgttacgatcgtaaaatccaggaaagtagtgttgtgcatagctgtaagtgcgggtatctgacagattgcaagttaacgataacaagatgtcatcttttacaatcgggatgatcaaagtttcgttggatttgattgaatccatgatttcgttaatagtcataatatatccctctcaatggtgtacacccaatataacaaagcccctgcacgaatgcaagggctttttgattagtgaccgatccggtacttgtacttgaggatccaatctgctttttgcgagtgggtcagtacgcggaagttgttttcttctgcaaacttcaacccagtggttacgatcttaaccatgccccactcttcgagaagtcgcgcaatgttgttccggcgtagttcgtcttcttccgtcatatcgacttgacgaccatcaagtttcaacagttctttaaaatgcacgataaaatacttaccttgctttttcagaatgtggcacgattgccagagcattttctttttgttgttcgcaataccaatacgggttagcgtttcacggatctttaaaaaagaatcgtcgctgattagttgaatttctaacatacatcaccattgtttaatcaatttttccaatttcttttgttcagctttgtttttcacaatacccaacaaagacagagcgacctttgcgtgttttcttttccaatcctcgaacattccgaggtctttaagttcctgcaaatattccatcgctgtacgtgtatttacactgtatttttcgcgaaggatttcgataataattttctcttcaaaatcttccgatagtttagcccatgcaccgaagcgtttagccttcctaacagagttgagataatagttatagtgcatttggtcagagatactaccgcctaccagattcatcacataagcgttatatatcgtgtctatgtgctggctcattgcgttgtctacaaagtacttatcatacacttcatcgataaccaacggagttttaccgttgttgatttcgtctatgatgttaaacaaggtgttttctttatccttgccgtactctttgatcagttcttcaaccttatcccaatctttagaaagccaagcggattcatgcggggataactcttcttcatccagaaattccgccaggctcatgattacgcctcccagaccatagaaagcatcaggttcatcaacagatattgcagatgaatttctttattcatcgccagcccgtattgcgcgttgttttcgcccacaatctggatcagtgcgattttcgaatcctgattcacgatagggtaaatcgtatcagtcaattttccgataaaggtatcgtattctgacgcatatttaataacctcagagcgcaaccctttatagttcttttctttcagcagggtaatgatatgagacacatcagaaccaacgatctcattcaggatcccagcatcaatttcaccacgtttcgaatagaacccgatcgctttgataatagaacgcgcatccggataatgctctttaacaaacgctgcaatgactttaggatcatacttgatattctcgatttcaaggataccgaaacaacgcttgattaactgtttcatcagttcgatacgttcagcatcagacggaacaccgaatttaacaggaggacaacgagaaagcagagcactatgcacaccgttaatgttgttcgctgttacaataacagaaacgtttttactgtatgcttcgataaagctacgcaagtgtttctgtgcttccgccataccagaacgatcgaattcatcaatgatgataatctttccgcctggtttctgcgtcattgatgaagcaaaacgatccagttcattacgaatgaagtttacaccacagttcgaaccgttgacaaagaacacctcagcatcaacctcacgggccaacacaagcgcgagggtcgttttaccagtgccaggggaatcagatacaagggtcatgttctcaacacgcccagatttgattatgccccgcatagcggctttgtcaccagaaggtaaaatacactcttcaatcgttgttgggcgatagcgctgatcccatgcaaattcatcaggagatcgggagattttaccgtatttggtttcgatgatttcaatattttcactaagttccataatataccttcaaaataaatggtgtaaaagaaaggggccgtagccccttaaaactatcttacttgaatgtgctacttgcttcaagtacgacgacgtaagcaacgccgttatcagaagagaatttcgcggcccctttggaggaaatctctactttgtaatcgctgttgatgaactgcatgttatcaatcttcatatcaaaattgaaaacattgtcgccttcatactcaccgacttcaacagagaaagttgattgactttctttgcttttcgcggtgatgaccagtttaccatcaatcggttcaacggacaggtcggtcagtttcatcatgcgagacgctttgatcagtttttcgaaatcgttagccgtaatctggaaaatcagatctgctactggcatcaccagacgttttttcggtttcgggatcgttgttgcgtctgctgaacgttcgatgatcttcatcttgtcgccgcgaatcacgatttcaccagtggaaatatcatgagtgatttccgcgtcagtgccgacgatgttcagcatgttcaggaatgagttgagatcgtagataccaacatcttcatcaatcacatcagcaatttcagcttctgcgtatacaacgctgttgattgatttcgtcatgatgaatgaacctttggtcaacatgatcgaagagttgatttgagaaaagtttttcaggatatcaatagtttgtttagagaatttcatattcagcctttagttttcaataagtgttacttaataagtgattttacaacggtttccgctgctgtgtcaagcatatcagccatttctttaacggttgtacgcttcggatcttcgcggcgttcgctggtaagtttacgatgttccgcaaccactttttcatcaatgtcacgatagtgtttaaaacgttcctcttgaggcatagctttaaacagttcttttgtttcgtccgagagtttagcaacccaggatttacggacgcggttcatgtagtcaacaaaaacattactttcattcatatatttcttctctaacttagaattctttgagtgggggccgaagcccccgcttgtattacatgtctaacagtttatccaggtcgtcatcaccggagctattagaatcatccagatcgaacggtacgccgtcatcttcgcctaccggaaccgatgcaacaccaccagatgatttcacatcagatgtctgattgtcaaacttagccatttcattatcgaagttgctcagttcgctatcaaggtcagcggaagcgctggaaccagcagaaccgatcgaactacccataactttattgaagcgagtggtcaggtcagccagcggtttgaattcgctttcggcagtaatcggacggagatcgctcataccttcgaaaattgctttctgaacttcttcatcgtcgatgtttttgatcttagccggaacaccaaacgaactatcgtcatagttaggccaatcaccaacttttttcgctttcagggtgaagttagcaccatcaaacggacaggttacagcaatacccggttcatcaagttctggattaccgttaattgcggcggtgatcttgtccatgattttcttaccgaagcggtatttgaacaccttaccttcgttttctggagcgcctgggtctttaacgatcaggacgttagcccagaaactttgtttacgaccgatctggctcagtagcttatcttctggcccgtttttgttggctttagccttctcatacagatcgttttcggaaatgtacttacatgcaggacagccgtcataatcgccgtgggtagaggaacagttctcaatgtaccactggttgtttttcttgaaagagtggctcacgatacggacgaacgccagttcatcatcggaacgtgctgggaggaatcgaataacggcggaaccgtttttctgcgcgtccagggtcagtttccattctttctcatctttctggaagccggaaccacctttcagatttgctacctgtgcctggagtttagcgggatcttgacgtttaaaaatgctgctcatattctgttttctcgtttagtttagtttgattaacgtttgtttcattaagtttcgatattttatgatatctttttcagtaaggtcaaatatttttctgtatgcctttaacttaatgctaaagtcagaccaaataatatcatcagctacttgatcgtgtttatttatgatacctaaaaatgagtcaaaaatcaaaaacgattcgtaagatatcacatttgacaggacaagtttgcttatgtaggacgttgatgatttttcgctgtacttgaacaccagagacacggggatctctttcattttggcgaattcgtacacgtttttaacgtcatccacaaacacgttatctagtctttgtaactttcctatgtactgcctgtaaaagacaatactatcttcatcaacatcgcctacccagaaatccggattggctacgaagttggagaggaatataaaatagatttctttgaatgtaaagcgttgagctaattttacaaagaaatatctatcctttcgcttgttaaaggcgttttcactaactttgatctgccagttgtattgaaggacatcaaaacgcccctggaaatgagttttcatcgccagatataacttgtatacagacaaaggcacaagccgtgaattcgcctcactatcagcaaacggagctttaaatctcacatgaagccgtccagagtggttgatgaactatgttcaagcgcaaccgatgggcgaagcatgtttcctttgatcgcttcgtcgctaatcttatcaaggatcgcgcgaggaaccgttttattcagcatcgcataatcaatggaattttcatccatccattgtagcgttgcttccatgtatgttgccccctcagaggcaaccagattttcgatatacaaaccgacttcggtcttatttccgatcatgctttacgccttatcgatcatatcatacagttcgatcagttcgttgttttcttcttcgaaagcggtacgggcctgttcgtgatacagtttgaacagtttcccgaaggtttttccgtcgataccgaaatcagtttttgctttggatttaatatccttgaaagtaccgttgaagatctcaacttgagttttcacgttggatgcttctttgatcagttcttttacctgttttgctacatcagggtttgtttgtaaaaattctacactcattttgttacctcaaaaatcactcagtttttcgaacatacgggaaagtttgttatccatgaagtaacgttccattttggctttacttccggattttggagtattatacgcttcaataatcgaattttcaatatcttttggtataaattcgaaatcgcgtagttcctcattttctttgtaacgagcggcccattcaggggtcatcaacgttgtcgggtcgtctgcctccagccatgcctctaactcagaggattttaccgctggggcgcgttcgccttcaaccttcgtcacaatataatcatttctaattttaatacaagcgatactatcttttttatcgcctttgatatttttgtatcgcagatcgttacgtggcgaaccgtacttaggcgttacccattttttctggggaggcgaccattgacgaacaccgttatatttctgtagttgtgtaaagtcgctatcagcagaaaccactaatactcgtctaccttcaccaacagcttttttcgtaacaacagcaattatatcatcagcttccgcgaattcaacctttaatccaagataaggcatattctgacggatttcttcgaacacaggattcaggaagttgtttagacgatcccaatcccattctgattcttcgtgttcgatctgacgacgttttttgtagtaccaggctttttgcctacgccagtaatttctgtcatcgaaggcaatcacgatttctggatactcacctttaaattttacaacgttaaaccgtaaagtgtcaagcaccagatgacgaatcatttcgatcgtgatggatgcttgttcctttggtttgaagttgttcatcagtgtagcgatggaaatgttagagatatcgatgaccatagtatcatcgggttccccttcatcttgcatcagcttgttcaagttaaacatgcttgcaaaactgctcatacatacctcaatttttcaaagaacggggttattgtagtaacttacgaaatgaagtcaatacaaaagaccataaaaattttgatcaataatacttgatctgatcaaatttatgatctataatttattaattaataattattttactacaatgatcattgtaggtcaagtactaaaatcaataaattttatataatttagatctgatctatagatcattagatctactttaaccttaaataatatagaatgaaatttgattttgtctacagttattatataatattattaacttcaaagaggaaatatgaatactatgactaaagaaacaaccaatatctacgcagacaatgaaaaattataccctatcctctgtgcatggaaaaagcaaatcgccgaaacaggtgatcgcaaaatgcctaatgagttaggtgctgctattatggatattgcaaacgggctatcacgtcgttacaacttcaaccgttattccgaagattggaaaatggatatgatcgatgacggaatttccgctgcaatctcaggactgcataacttcgatgaaactcgttataccaacgtttacggttacattaacaaagcatgttggcaagcattcgtaacacgtattctgtacgagaaaaaagagaacgcgaagaaatataaattcttccttgagcacgtttacgactgcgaagattcagatatggttagtattgcagacgaaggtttcattcaagatctacatgacaaactatctcagtacgaggcttccgccaccaaaaccaaagacaaggaagcggaagtattcccaacattggaagattttctatgaaagcaataattgacttaaacaaaatattaactgatatcgattacgaaattgacttgctaccctacttcgtaaaattagagttgcaaaacgtgggaatcccggttatcatcgatccaactgacgtaagaaaccccgatttcgaagtagaagaaggggttttgtcttatatgataaacgccgaaactatgatcatggagatcacttatgattgatgaagagaaagaagtactaaccagtgtggaagaagtggatccagaagaggaaattcaacaaaagatccaggcacgtgtagaagccgacgcattgaagcgagcacaaaaattcattaagaagaaccggactgagatcaaacgcctccgtagacatgcagaggaagccctattcaggggtaataaagttcagtatgtgtatgcggttaagaaacttcgtgatatgctcaaacagccgtatacagaggatttcattgatacgatgtggaacacttcactggcatcaattcgaaatatcgtagcttcacaacagaagcactaacaaacaagtagccccgaaaggggctatgagggtcttatgagaaagtacttaatgatcggggatacacacgctggcttgcgtcaggacaacccctggaatgaagaaaacctatacaatgtattcgtgcaaatcgtagaacactgcaaagcaaacggcattaccgaggctttccatgctggtgatttctttgatgtgcgaaaggccaccacacaaaccacgatgaaattcattcgtgaacgtattgtgccactactggaagaagccggattacatatctatgttctggttgggaaccacgattgccagtttaaagacaagatccgccctaactcaccgcgagagattcttgatcagtatgattgctttactgttgttgatgaaccgatgacagtaaatcttgatacttctccgctacaatcaatcgatttgatcccgtggatttgtcaagaaaatacacagcagatttttgatttcatcaaaaagtcaaaatctcaatactgcttaggacactttgaactgtccggatactatttctataagaacagtaaagcggatcatgggcttgaaccggatttcttaaagaaatatgatatcgtgtattcaggccactatcatcacgctaacgaaggcgctaacgttttctatatcggtacacctcttaccatgagcgcgaacgatgaggacgaaaccaggggcttctatgagctatcttatggcgacggtaaacgtgaattaactttcattgctaacccagtatgccaccatcgccggatcacctatccggatcaaaaagatgttgatgttgccgattacaaaaattgctctgttcgtttgattgttcgcgaagttgataacgatttgcctaagtttcaaacaaaactggaagaaacagtttatgagttgaacattgtcgatcgtgtgatcactgattcagaagttgatactgactttgaaatcaaaagcgtatctggattgattagtgagtacatcaacaacatgcagatcactccagaagaaaagaccgaagtatctgcaataatgagtgcattgtatgcagaggttacgagtaatggaaatagttgattacgttaatattttaaacgaagaagggcgatataaagccctttataaaatgtttggatttgatgtgattgttgcagtacagcaggattcctataatgagtatgtgtcattggggttcactctgattaaagacaactatcacgaaacaaaggtttggacatttactgtcctgaatagcatggatgaagattccgtgatatactgctttgatagcacgattacaaacatgattagtgatatatcccaaaggataattgatgaaactcaaatttaaaacattgacttatcaaaatatcttgtcggtcggtaacgtaccgatcgtcattgattttgattcagcaaagaaaaccctcattacgggtaaaaacggcggtggtaaatccaccatgatcgaagcgcttacatatgctctctttggtaagtcatttcgcgatctgaaagtcgggcaactggtgaacagtatcaacaagaaaaaatgtctggttgaactgttgatcgaatacggcaatgatgaatataaaatcatccgtggacaaaagccgaaagtatttgagatctggaagaatggcgaaaaactgccggaagattcagccgctggtgattatcagtcacagcttgaatcaatgttgaatattaacctggtgggctttaaacaggttatcgttctgggtactgctggttatgtacctttcatggaactgaaaacaccagatcgccgtaaattggttgaagatttgctttctctgtctattatcagtgaaatggacaaactaaacaaatcatacatccgtggtgttaaccgtgaactggatacgctttcaatgcagattggacacgtacaacagcagatcgcaacacatcaaaagttcattgacgaacaacgggcaaaagcaaatcagaatacggcgcgttaccaggatatctacgattcccacgtagaaacagcaaaacagattaaagcgcaattagttgaacttcaaacccagatcgcagaatgcgtgatcaatggtgaagaccaaacagcaaatattcaaaaactgcgtgatggctatacacgcctctcaatgaacgtagaacagttgcagcgtcttgaggtgatgtatcgcaagggtggtgaatgtccggcctgtaaacagccaattagccccactcctgaacgcatggaagaaattgccgagaacattaaaaacggtactcagaaacttacgctgattaagaacaagcaagatcagctacagaaaatcatggatgatttactaacacaacaacgtacactaaatgggctgaaatccaaatacgaatcactacgcggtacacttcaaaatgaagttgcagcggctaaacgtgttcgggctgtcatggataaagcacaggaagacgtggtgatcgacgaatccccagttgaaaaactccgtgaagatgaaaaggaacttgattctaaacgttctggatttgtcaaggaaaaatattttagaggtattgttacggatctgctgaaagattccggcgttaaagcgagcatcgttaaacgttatattccttacttcaataaacagattgcgtactatctggatctgttgggtgctgattatcagttcactctggatgacgaatttaacgaatcgattaaatcgctgggtcgtaatgattttagttacgcatcgttcagtcaaggcgaaagagcacgtattaaccttgcattgcttatgacgtggcgcgacgtaaccagtaaaatttctggtgttgatttatctctcctgatccttgatgagatttttgatggtgcaatggatcgtgaaggtgggtttgctgtgagaaaattacttgatgatattgagggtaatgttatagttatcagtcatcaagaactggatccgcaagatttcaacaggcatattactatggctaaagttggtcgatttactaaatgtacgattgtaaacaatgattactaaaaaatgggacgacgaatttcaagccgagattcgtcgtcggttttaccatgtaggcgggattttgtatcataaaacagagagtagaccaacggtgtctgttcctgctggttactattttaaacccggtgatgtggtaaaattcaacaaaacgagaaaaaagaatccgtacttacagatttgtatgaggtatgaagggaaatctaactatctgtacgtgcatagagttgtctggtttttagaatacgggtatcaagttgatcttattgaccatattgatatgaatccattcaataatgatccttctaacctacgagaagccacgacgcaacaaaatcactacaataaaaaaggaaaatctaacacatcctcaatatataaaggtgtatcatgggataagccaacttgtaaatggaaagttggtatacaatacaataggaaaaagatccatttaggatattttgacgatgaaatagaagctgcaaaggcatatgatgctaaagctatagaaatcagcggaaaatacgcgaggttgaacttttcatgaatatgttagaaaaatcttttgaattagaaaccgccccagaaatagagcggttttatctccacaacaattttcttgaagaaaaacatatagttactatgagagatgttgaggaagcattcaaaaataatcctatagagttgacgcgaatcaagaacaacaaaagttctgtttggttcctcgaaaaaatctattgaccgaaatccataaatacagtaaagtagcccatgtaacgaaacgtgggctttgtttttatttgaggaacaataaatgatcactgaatccaaaatgacttatcaggaagcactgaaagttttgggcgcaactggtagcgaaaccagcgctgaaatgtccagactcttcaaacgtgcatccttacgcaatcaccccgaccgtggtggtagcaatgaattaatgcagaaaattaaccaggcttacgacgtagttacaaaaactgggcctagtggcgcacgttctgagactgctggtgatgttcgcgcacgttatgcacgtcaaaagaaagaatgggaagaaaaagttgatgcttactttgtagtggcgaaaaactatttcagcaccaaatttaacgcacaggaatttgcggaatacttcaccaaatacactggattgcctaccactttcaaacaggaagtaacaaaaggtagtcacggtgtttatgcttcgttccgtttcacttctggtgatgcttactttgatttcggtttcaactgcacccctccgaatggacaagggttagccgctccggattcatctgcactgggtaacgtttctgttagtacctttgtactggttggaactaaaaaacataaaatggcaagccgtgattatcaatggggcaaaaacccagacaagatcactccggaaagcctgttcccgtctaaaaaactggaaagcattttcagccctgtacataaaaatatcaaatacaaacgtgctgactacctggcgtcattccgtaagctgttaggcgctgacgttagcggaaacgatatctttgttgaagttggtacactgaaagttcgtttctatcgtcacgtattcatgcgtaaaggtgcgtatgtgtttagcgcggtgtatgatcctgctgtatctaagtatcgtccggctgcacaacttcgcggaactatgttcgaagatgaggacggcgcttgcctggatatgatcgttgatacgttcaaagagttgcagaaactgaaaccgagtgttcaaggcgttgtgaacgcgatcgataagatgaacgcagagtttgcagcgggacatcgttcagcatcttttgttaaacgtgtagctgctcaggaagccgcaccaaaaccagaagagaagccgaagcgcacagttaaccgtattggtaaagaggaatacttcgcagcactcaaagatattggtgctcgtgtaatgcctaccagcggttatgttgaatttgataacggcgctggtgttactatcaacttcaagcgtattgttgtaaaccgtaaagcatactactcattcagtagctttgatttcacgtactctggtcagaaacacattgagtggttgaaaggaatcgatatcgcagaagataccaaaggcgcaagcattagcctactcactgatactctgaaatctttacgtgggatctctgactggaacactgttaagagcgctttagatcaaatgaattctaacttcaaggcgggtaaattctccgcacctcatgtgaagaaggaagcagagcaaaaagcaccgaaacagaaagacgaaatcggcgcacagcctaccaaaccacaggcggctaagaaagatacaccagaagtggaaaaatcacaggctgttcatgcagcacgtgagaaagcgaatatgaacaacactattcgtaaaatgatgactatgttagtcaaagcacagcgcaaagacactccggaagatatcaagaaggaagttgatgcagcaattcaattgtggcgcttgacttattaatcaaatgaattataatgggaactgttaacgcagttccctttttatttgaggaaaatattatgagttgtccaacatggttacgtttggaaaatctgaaagaaggtacacaaaaacggatttatattaatcttggttgggttcctcctaccgattttcaaatggctgagattttaatcaatgctgttaaagaagtaagcgacacttacgaatgggaaaggctctattttcctttgattggtttgtatatgacgcgaaataaatttgaagaaatgaaacttgctgttattcgcgctacgattattaattcccaacaaagatttactttgaaaaatgcatggagttctgaatgattattcaagtatctgtacagggtgacactctgactgtcaccgaatccatcaataccgctcttgctgtatgtcgtgaccatatctcacaaaatcctccagtgactgagatcctggaaattgatgtttgggatcagattgggatgatcgacgcatcatatggatttaccccgcgagatgaagaactatctcgtatcgaatcatggctgaatgaacaggaaacggaatgaaactccctaagaacacaacactactaacccgcgaaaaacttcactctgttgattggtgtcctctggatatcatgatttttgatattgaatctcgcgtgatcaatgcaaaatatcaggggtgtagtattttctctgttgaattcgagaagattcgcggatatgatgagaagtacaaagaaaaactgaaagttatgattgaagcattaggctatattgtaactgttgaagacaacaaaatgtggatcgcaatatgagcatagtaaaagcggtgtttgcattgggaattgatatctatcacgatgatttcgcttttggatatcagcaagggttgccgtggggccactgtaaagaagatttgcagaacttcaaagaagaaaccgcagatagcgttttgatcatgggtgcaaatacgtttacctctcttccgggtaaacttcctggtaggatccattgtgttctgtctggttcaggtagttttttgaaaaccaaaaaaggcgacgttgctgattacgtgatccacggtggcgggttgtctgctgctattggtacaatgcaagcaacacacccagataaaaatgtatgtgtcatcggtggtaaggggttgcttttagattcaatcaataataaaatggttgatgaagtaattttgacaaacatttacggacatcatgtgtataacgcaccagcgtttaaacgtgatgttgcatttactctttctgaactgggtggcgcattattaaaatatgaattttctgatttaaaaactcagtacataaaagaacatgaacgcattgaaaaaatcgtagttgaacgatataaaaaggtataaaatgaaacaatatctggatattattaaacttgtacttgataacggtgttgaatcaactgatcgcactggtgtaggtactattcgtattttcggcgcacaagcccgatgggatctaaacagaggtttccccgcaactacctgtaaaaaactattcttcaaaccgtgcaagcatgaattgcaatggttcctgtccggttcaaccaacgttgaagaacttcgccggatgacctggggtgaaaatagcgataagcgcacaatctgggatgataactatgaaaaacaagctattgatttaggatacgattctggttatctggggccaatctacggtcatcaatggcgttcgtttggttctctttatggggatgatgatagttattatggcggtagtggtgttgaccagatcgcaaaagtcattgaacaactgaaatcaaccccagacgatcgcgggatcatcgtttcggcatggaaccctgttgatcttgatgatatggcattgcgtccgtgtcactgtttctttcagttcgttgtaatcaacggtaaactgtctctacagtggtatcagcgttcagttgatgtcttcttagggttgccgttcaatatcgcctcctatgctctcctgacgcatattatcgctgatatttgcgggtacgaagtgggcgatctggtttggactggtggtgatgtccatatctataaaaatgcggttgaacaggcaaaagaacttttacagcctaaccgttcaccaatgccattaccgattctaaaaatgccgaaggtaaatagcttacttgatttagatcaagaattctttgactcgataaccttagaagggtatcataatcacggctctctaaaagctgaaatggcagtatgaaaaatggggcttcggcccctttcttaacaaggtaagagaatgaatgacattaaagtagtagtaaaatcctctggtgtacgccagccgtttgacaaagaaaaaatatacaaagtgctcaagtgggcctgtgatggtcataatatcgatgttcgtgcattccttgaaaatgtattagaactgatccgcgatggtatgactaccaaacaaattcaacgtatcgctatcaagtatgcagcagatcatatttctgttaaagaaccagattggcaatacgtagcatcgaatcttgaaatgtttgcattgcgtaaagacgtttacggtcagttcgatcctatcccgttctacgatcacatcgttaaaatggttgaagcggggaaatacgataaagagatcctggaaaaatacagcaagcaagatattcaagttttcgaacgtgcaattgaccatgataaagattttgaattttcgtatgctggttcccaacagttaatcgggaaatatctggttcaggatcgcgatactggagaaatctttgaaacccctcagtatgcgtttatgcttattgcgatgtgtctgcatcaggaagaaactgggttagcacaggttacgcatatcgttgatttttataacgcaatttccgatcgcaaactgtctctaccgactccaattatggcgggtgtacgtactcctacgcgccagttctccagttgtgtagtaattgaatcgggtgattctcttggttctcttaacgctgtaacctctgcgatcgtgaagtatatttcacaacgtgctggtattggggttaacgcgggacatattcgcgcaatgggttctaaaatccgtggtggtgaagctgttcatactggtgtgattcctttctggaaacatattcaaaccgctgttaaatcctgttcacagggtggcgttcgtggtggtgctgcaacactgtattatcctttctggcatctggaagttgaaaaccttctggtgttgaagaacaacaaaggcgtagaagaaaaccgcgttcgtcatcttgattatggtgtacagcttaaccagttgatgtataaacgcttaatgaatcgtgattacattacgctgtttagtccggatgttgctaacgatcgcctgtatgatctgttctatgaagctgatcagactgcatttgaagaactgtatgaaagcctggaaaaagatccaactgttcgtaaaaaacgcatcaaagcggttgacctgttccaacttttagcacaggaacgcgcacagacaggacgcaaatacattttcaacactcatcacgtcaaccaacagggtagttttacggttcctgtccgtatgtctaacctctgctgtgagattgcgatcccaacgtcgccgctggatgatgatgataaaatggctggtgaaatcggattgtgtacgttaatggctatcgttctggataacgctgatatcagcgaattcccgaaactcacgcgtattgcagtacgtgcgcttgataacctgctggattaccagaactaccctgtaaaagccgctctgaaagctaaacagcgccgctctctgggtgttggtatcaccaactatgcatcatggttagcgagcaactattgcgactactcagaagcgtatacagacaaagttcatgagctaatggaagcgtttcagtttaaccttctcgttgcttctatggaactggcgaaagaacgtggtgcatgtggattgtacaacgataccaaatacgctcgcgggttactgcctatcgattggtattgcaaaaccgttgatgaactggtagcacctgtttataattgcgattgggaatggttacgtagccagattaagaaatacggcttgcgcaactctactctttctgctttaatgccttgtgaaagtagttcacaggttagtaactctaccaacgggatcgaacctccgcgcggtttagtgagtatcaaatcttcgaaagaaggacactataaccaggttgtgcctaaccagaataaccagattgatttctatgatctgctctgggatatggctaaacgcggtaacaaagggtatctgtctcatgtagcagttatgcagaagtttgtcgatcagtctatttctgcaaacaccaactatgacccggcaaactatgaagacgggaaagttaaaacagaagacatcattgatgatctgctgtatgctaactactacggtgttaaaactctgtactatcataatacgcgtgatggtgctggtgatgaagaagaagccgccgaagattgcgcgggttgtaagatttgattaatgccccttcgggggctttttaaaggtaaagacatgttaacagtaatgaatacaaacccagatcataaccacttagaacaacctatgttttttggtgaagatactggtgttgcacgttatgaatcgcagaaacacaaagttttcgaaagcctgacgcaaaaacagctttctttcttctggcgtccggaagaagtcgatctgtctactgaccgtatgcagtatgcaaaacttcctgaacatgaaaaaatcattttcgattctaacctacagtatcaaaccctgttagataccattcagggacgtgggcctaacctcgcatttttgccaattacatccgatgtgagcatggaaacctggatcgaaacgtgggcgtttagtgaaaccatccacagccgtagttacacgcatattcaacgtaacttgcacattgatccttctgtacagttcgaccaaatccttcgcaatgaagcgattatgaaacgttctgcatcaatgacacggtattatgatactctgattgatgaatgtcataagctgaaaaccatcatgatgctacaggaacaggttagcggctataaaccaaatgatccggctgtcgtgtattataacgagcaatacactaaacaggccactaagtgcaaagaagctctgtacctgtgtatgcacgctgtgaacgctctggaagcgatccgtttctatgtgtcgtttagtttcacctttaactttgctgaacaaggcaagatggaaggcaacgcgaaaattatgcgcctgattgcgcgtgatgaagcattgcatcagaaaggtactcagagtaaaatccgtttgtggcaaatgggtaaagatgatccagaaatggttgaaatctcccgtaggctgaaaaaagaagcaacggctatcttcctggaagtatatgaacaggaaaaagaatgggctgaacatttattctctgttggtgatgtagaaggtgtatcgctgaaaagcactatcgcttatattgaacaccttacagatcagcgtatgcgagcggtagggcttgattcgccattcaccccgatccctaacccgtatccgtggatgaataaatggctcaaaagtgataacgtacaggttgccccgcaagaggttgaagtaagttcttacctcgtcggaaacttgaatactgaaatcagtgatgaagcgtatgcaaaatgggccagcaaatacgcgtgattgtcgggtagtaaacaagtacaaaactgattgggatgtcgatattcaaagaggtacgaagttcggcaacccttatcacacaggaaccaggggagaaaacattttagcgtttatcccctggttccagaatcaggttcgtactggggcgatcacgattgaagaattgaaagaacttgatggaaagaggcttggttgtacctgtgcgcctcttccctgtcacggtgattacatcgcgcatgtggttaatgttttgtgtggtaagaaaagatcacttgactttttggatatataatgtatgaaatctgaattcaacttaacccttgataaatgtggtcgcatcgatcgaagttttgttaagtgtggtgaacttaggcattgtgtttattttattgcaattaacgatgaaatagtatatgttggtaagtgtagggatatgtggaagcgtttagacacatatcgcaatgcaaagtattggagagaagccaaccccagtaacatcttaaaaacgtgtcgattggaaatggctatcaaaaaacgaaaaactgtgaaacttatcgtgactactcacgatgaaaatacatatcatgattatgaaatcaacatgatacgaaaatacaaccctgaatggaataaacagcactatgacaaaggcacaaactaaaattatcaataccctttacaaacaactcatgcagttgtgtggtgaatccgaaacatttttcttcgttgatcaagtaaccgtgatgggtacacctgttcgaatctttaactatcgcatggcctcatatacagactggctaaagcctggtgctctggaatgtcgcggtatcatgtttgaaatggatggagatacccccgtatcaatcatcagccgccctatggagaagttttttaactatgccgaggtaaaggcatgggaagcgcttaacgagtctcctattgaattaggcgaagttttagacgtgatgattaaagaagatggttccttgatctcaactttccttgacggtggatttctggcggtcaagtctaaaggttcggttaaatcagaacaagctatggatgcgcacagcgtgttaatggcaaatcgtgaattgctgacccgcttaactgagatcgctaaagaaaactatacggtgaatatggaatacgtttccccgaaaaaccgtatcgttgttggttatgattctccggatctgcgtatcctgaacgttcgtcataacatcacgggtgaatacatcccttatgatgatctgtttgctgacgcgctgttacgtgcgtatctggttaagcgcgagaatatcgaagtactggatctggatgcattcgcaaaagaagcatatcagaatgaaggattcgaaggctatgttgttctgacaacgaaagggtttgtaaaaatcaaaacaaactggtatgtcaatctgcatcgcacaaaagatagcattaccaacaataaggatcttttcctaaatattgttgagaatacggtcgatgacctgaaacagctattcagttcggatctggtctctctgaaaaagattgacgatttcgaaaaacttttccttgatagtctcaatcgtttgagtgcaaaagcattcaaagccattgaagataacaaagggaaatcgcgtaaagattttgctatcagtctaagcgcggatttgtcaaacgacggtcggatcatcttcgggcctcttatgaagtatttcgaagaaaccgatccacaaaaactggtcgatcgcatcattgaaatgatggttaaaaattacgatcagttcattcctgaacaatataaatgaggttcataatgcctaagatatcatcttgggtatggcctgtaatcgtggggctatctttgatagcccttttttacattgcagtcgataccaaaatcgaaaacgcatcgttacgcaaggatatcaaatctttgcaagatgatgtgaagaaagtaaaagagacaaatacaagcaatactgttatctacgtggaacaaaaatccaaagatcagcagttagtcaaggatgcagggcgcaaacaccttttgtttgagaaacctggattgattgaaatcaaaatcaacaaatccttcgacgaatacatgagaaatttcgataatgaccaatgaagaaaaatgtaatcatgtactaaagtatgtgaaagtagatattgagaatgggatcgcgtattggaagaatccaaccaacccaaaaatagccatcaacgccccagcgggggctaaagataaacatggatatacaattatttgttgtgatggtataaaagtaaagagacatagattagttttctatgttgctaaaggatatctccctaaaatagttgatcataaggatggtatagaggctggagacggcataaacaatttacgagaagcatcacctaccagaaattctagaaatagaggggaaccaaaaacccaaacaggaacaggtattaagggagtatacaaaatatcaaaaaacaatagatatttttcaagtatacgccataatggtaaaggaatatacttaggtagttacgatacagtagaagaagctaaacgtgcttatgaaatgaaggctatggaattgtttggtgaaaattataggagatttgaaaaatgaaattagcaatgatagtattacttggtgtttttctcgttggttgtgctgaacagccacctgttaaggtacttcctacgctacccgcaaaggttaacccagtgaaggtaaaatggaaagtaattgcagacgttagagaaatcgacgggaaacaatacctcgtaatgccatatgatggtaatccttatgttgcattgacatatccagattcattgattttacgtagctggatgaatgacgttaaaagacaaaaggatcaaaccgataatgttctgtgtacgttgggataccctgagaaatgcaaatcaaaataactaaaacgttttttcgtgacataacagaaggaaaagtttatactgcgaaaaaggataaagaaggtctatggatagaaaacgattggaatcgtgatatgtggctcaatctgacgaatgagtataacaaagaactaattgaatatgagatagtgaaatgaatttgtttatgactattggcgttcctggtagtggaaaaactacctgggcgcatgagaaagcccgtgaattgggtaatactgttacgatatctcgcgatgatctgcgtagctctttgtataatgctggtaagggtgctggcggatacaaatacaccaaagctaaagaagaaatgattgcggaaatgcaggatcacgttgttatctccactctgaaagatggtaaaaacgtgatcatacacaacacgcatctgaaagaaagtgataaaaatcactggcgtgaaattgcattggaacacaaagcagattttcatatcgaatactttgatgtgtccattgttgaactgcttcgccgtaaccacaaacgcggctgtgatgcattacccgtttcgcgtgtttgggaaatgtttaaccagtatcgtaagatccgtgggttcgtaccagcaatggaaattgtcaatccccacaatcagaaatgcgtgatctttgatgttgatggtacgctaacaaaagtagggcaacgtagcccgtatgactttaccaaagtgatcaatgatccgccaaacatcccgatccagcaactgtttcacctgtacaaaaatgcagggtataagtgtgttgttgtgtctgggcgtgaaggtaatccgcaatgcgcacatgatacatgggttagcctgttgagttatggcgttgaaccggatgaaatttttatgcgtcaagaaggtgataccaggacagattttgaagtaaaagaagaaattttgtttgacaagattttagataagtattatcctgttattgcagtggacgatagagacactccggtcggaatgtggcgagcaaacgggattccgtgcttacaagtcgattatggtgatttctgattgacatataatgtgggtatgttaaagtacccacacaaaagaggattatattatgaacgttattcgtgaagataaacacatcatggttgaacttggcgatcgcattcgcgtagaaaatctgggcgattttaaccaaaaagttcgtttgttgtgccaaaaaattgctaacaaaattcaggaacagggtaaagctccgggcgggtttgaagttagcgccactccggtttctcagtactcctatattgtgtatattcatgacgtggatactaacagcacccaatctttcgggctggtgttaaatcctattactggctacgttacatgggcggctgtattatgaaagtaaaagtaattgatagagcgatgatcacggatgaatctgtatacccagatcctcgttattatggcggtgttttcggatacatcaaaggaactgatattgatgtagtaacaagtccgatcgccgaatacgatatcaacaaagatcagacagaagttcgcgttactacaatcaacggttcagaatatatcgttgaagcgactcctgattttatcaaacagttactaaaggtgatgaaagatgcttgatcatcctggctctatgagcatggtgcttctggaagcattgaaagcatatgatatcccctgtcatttcggtgaagtaactgttaatactatcgttgacgaaatcgacaatccaaatactttcattgcttgtcttgttcgaaaattcacaagttgttttcgaccgagtccagaaaaagtagtaatcagttctgtttctgcacatcatcgagtgttagatgatggaaagattcaactttactggaaagttctttatcacgtggtgtatcatgaagattgatgatattatgtttatgcttagagcaataagcgcttctaagttctctcaatgtgtctccgttaatgttggtgctgcattgagaaatggtaacgggcgtgtgtttgtaggcgcaaataatacggttgatcctagtcatcgttgtacagatcagtgcaatcacttattagatgataacgggaaactgagtgaagaaaagcgccctgaacattcacaatggtcagatcgcaacgaagtacacgcagaaatgcgcgttattatgctggcggcgtctcatgaacaaatcaaagacgcaactttgtatacaactcattccccttgctcacaatgtgcgaaaaatatcgaattttgtgttgcaacaggtatgattaagcgtgtagtatatctacataaatacgatcgtggtggcatcgagtggatatggcgtctacagcaatacggtgccgaagtagtacaacttgatcccgaagaattgaataaacatttccggattaaataaccaatgagtaaatgtatgtctgaactgagtgtaaaagcatcctttgaatatgttctgattgaaaccaacgctaaagcggctggaactgaaattgtatcaccttctggtattgtgactggtgttcgtcaacacggcgaggaaccgatctacggcacagtgttatcatgtgggccggatgtaccggaagaatataaaaccctgcttatgggtaagcgtgtaccgcttcctcatgcacaaatggcaaacgtgccggatcctgaactgattgcaggaaaggcaacaaaagaagaagctcgcaagtatccggttaaatatgtaaccgcacactataaagcgattcaagcaatttacgaataagagatccaacatggctaaacaaattcaagcaatcatcgccgataccgtcgcaaaatccaaaaaacttttcgacaaaggcgacatcctcgaagcaccgacccgcatcgatgtaatgacttcaatgatcattgatgctcaccagggaaaactaaattcccgtgcttcggaagtaatggaatacatcgtacagttcgaggatgtatgcaaatacgccaaagctgttgatccggctgttcgcgaaatctaccgcaaacagttctaaaaatattggccccttagctcaataggtagagctaatcactcataatggttaggttcccggttcaagtcacgggaggggccaccaaacaaggcaaggcacttagagaagcgggaggaacagaatctgattctgttggttgtaggtgcaaatcctacccttgccaccaaatttgggtgcgtagcgcaatgccgttaaatggttcggaatatgcaaccttatccacaggaaaggctctgttggtatccggtaataggttccccggaatgcggggtgaagtaaagaaacttccagcccactaattttaatgaggtttatatgaaatttcgtgaaactgtgaaataccataacgcggtcgaatatacacagatttttgttgatatgtctcccgcaaaattcaaagaacgttatggcatgacatttaatgaatggaaagatggattgcccgatggggattaccgaaaaaacttcaaattcagtgaatgttatgtggatgatgacccttacgatctggatgtttgtagtaaaacaacacctctcattgagaattcaccagaacagctttacgaatcttgtattgattctgcatacgaaatttaaagagataacatgaaaaatttacaaaaactgtttaaaatgtctccggcaattagaaaaatcatcggagaaagcaatccaacgaatcgcaataaaaaattgatggaactttttgtaaaagagttcgatgattttgattctgaacttcataaagcgcttgaggcatattccaaacaagggttctttgcatcgccgcaagtgaatagtaagaaagagtatagcgaacgattctttgattgggagattgtcaatctcgttcgtagaacaaatatatctccgagcaatcatcaattgatttctcttgatacttcggtattctttatccagtatcttatcagtggtggtttcaaaaatcctgaaattccgtttacaaatgaagcggttagcagtgaatttgatgaatcatttgtatacatcaacacaaacaaataatcaaatggctatcttcggatagccttatttttggggtgtctatgcgctttttaaagtatgcaagttggatcgtactcgtccctcttgacattattactggagtattagcaattctgtttgccccgtttgttgtaccattctacaacgagaaaacagggcatcttcctaaaggcttccggtggatggaaaccttcgataaccctattgatggtgatggtggacatatccgccgttgggcgtccatacgctatcatctgggggcttttggggtgtacatgcaacgtgttggctggttgtggagaaacaaggcttataacttcgcatatcacgttttaggacgtgaagcgacaagcaaattcaactggaaaggcaacccaaaaacagaaggtgggccgaaccctgtaaatcatgggtatctgctcatgtggaacgaatcagcatggggtttgtacgtttacaaaccgtggctacggatccacaaagtgcaattctgtttgcgcgtttatgctggatggaagctgaaacaagaagttagcgacccagttaacctggatcgtgcaatgctggcgtttcatttcaacccgttcaggtattatgtaatcaagtaaaggtaatacaatgaaagcatttcaaattttagaaggtttgcatactggtacgatctatctggaagaaggtaacgatgttcggatcgtagtatcaaaaacattaactatggattctgtgatcggcaaagctcgcgttactccgtttgcaaagcgtgagatcgagatcgaatatcagccaactgttaaggtggaaggtggacaacatttaaacgttaacgtgttgcgccgagaaactctcctggatgcggttgaacatcctgaaaaatacccacagttaacgatccgtgtttctggttatgcagtgcgttttaactcactgacccctgaacagcaacgcgacgttatcgcccgaacctttacagagagtctataatggcaattgatgatatcaagggttataaaccccatactgataaaaaagtagaaacggtaaaccgtatcaaagatgctgaaaatgcattaggtgcaatcctggaagatatcgaacagcgactatcaaattcagatattgattcactgatagaggaagaattagatgaggtgcttgaacgtatccatcaaattcaactagcgaaagaccgactgaaagaagcctctatgtgggcgtgtcgtgcggtgtttcagcctgacgaaaaatattaaaaatcaagccgttgccgaaaggtagcggctttttcttttttggtgtaaaaagttgttgactcccttctcacattcccttatagttaatcccgtagacaagaaaacacttttatgaggatgacattatgaaacgctcttacaacatgaatgaactggttttcttcaaaactcgtcgtgaagcacgtgcttacgttctggcggctggtaaaaatacttctgctgctatcgatatgggtactgataaagctgttggtgctcgttgggccgctgttatcgttatcgctgctccggttactccggttaaaactctggtacttggtgcgcgtcacgccgaaactcttaacactgctgcaagcggtaggggccacgaagttaaagtgttcaagaagcgttcttatctttcatgtgcaaggggttaactatggcacgattcatatataaagtggaatacgaaaatactgagttatctgatacctttttgaagatgattcgtgatcacgggcaacgtctggaaagagtaacgattgatactgcgtttgattgtcctgttgggttggttctaacattatcttgcagccccgcaaaagaatcagcccgtgttgaaatgttacataaactaaatgcattttatgaaggtggtagtgtatggcgagtattgtaaaatttttcaccgactcagtgaaagaaattaaaagcgctctggaacaatggaacactcgttgtgatgtatccattaaatcagagtacgaaacaacttatgatcgttatgatccggcccgtggtttgcacaataacccccatgaggtggaagtgtgaaatactacggattcaaaacgagtcattttggtaaagcgtatcgtacagaaaacatcgatcgcaaacgtccgtactatgattctttagtacgcgcgggacgcaaacgcgctcgccaggaagggaagaaagaaggtgaagatcgtggataattggaaaacatgggtatcaattatcgttggtgttatcatcggtcgcggtttgtatgatttaatattttcggcgggggttcattatggacattggttcgggtagtcagtacccatcatgcgcgttaagcaacttcgctccgcatccgtttacgtttgacggggtagaatgtgcatcaatggagggctttttacaaagccttaaattcagcaacccagatatgcaagcccatgtatgtactctggtaggcaaggccgcaaagttcaaaggcaaaaagaaaaaatggtggactaaccagaccttatactggaaaggtatccctattcatcgttcctctgaggcgtatcaaatcctgattgaaaacgcatataatgcgttattccttaatgaagggtttcgccgtgcgctggcagcaaccggaaaaagtaccttgacacattcaatgggaaagaataagatgaatgaaacggtgctcactgaacgtgagtttgtccgaaatttaacccgattgagagatctgttatgagtgaaaaagaaagagtagaatgcgtgtttctgttcaaaggcgcgattaatccattagcgttactgtatgcgcaacatgcattacgttcaacgttgattcagagtgttatctataaagcaggtgtgtattatgttaccatcggcgcaaataacatggttgttattgaatcctatgttaaggaatgtgcatcaaacggcgttgtctttgataaagtcgattttgatgcaggggtagatgctgtttatatgtataagggttgatatgagttacgtagtttatttcgattgttcggatctcgatccgttcgtgcttcaacaggcaaagaaatatcatcaagatgtcgttggcattggtgtaacaaatgatgatatgttgtgcatcgaatttgaatattatcggacatttgagcgtgaacaattcctgggtgaattgaatgcattcaaaagtacccttttctttgatcgttatgaggttatatcttgaaacctgttattcttaccgatattgacgggatcgccgtaaaatggcaaagcggcctcccgttctttttgtctaagcacaacatgcctactgatattgcattagaaatggttacagatgaaaaatttcgtgatatgaccgaaatcttcggatgtgatcagcagttggctaaaatccttatggaagaatacaataacagttctttcattcgttatctgaatgcgtatgatgatgcattgattgtgatcaaccgtctgaaaacgcagtatgatttcgttgccgttaccgctctgggaacaacaccaacggcaagccttaaccgaattgctaacctgaatactcttttcccgtctgcgtttaaagaggtgatggtcgtgggccacggtgaaacaaaaactcatcgttacctggaagcaaaagcaaagtatggtaatcgtctggtttgctttgttgatgatctcgcgataaacttaaacgaatgtcataacgtcattagtcagttgccgttattccatatgttacgtggtgaacgtgaagaaacaaatgcacctcaccagttagtaaaatcgtggtttgaaattgaagagaaactaaatgatcttgtcaatccttaatgaacttgcgtctactctgaaaaccaaagagaaagaagcaattttaaaacgtaatgccgataatgaattattgaaagaagttttccgcattacgtatacaaaacagattatgttttatgtgcgtcaatttcctctggtagaagggaaaccaggcacaacaccgctttccgatgcaatcaaagcattactggaagatttagcaagccggaaatatacaggcaatgcagcgcgtgatcgtttactggatattgtatcatcagtgaacattaacgatcgtgaagtgctacgccgtatcattaaccgcgatctggaatgtggtgctggcacaaccttaccaaacagggtatggaagaaactcattcctgaacagcctcaatgcctcgctacgccgtttagtgaaaaggctttacgtcgcatcattttccctgcttactcgcagcttaaagccgatggtgcgcgttgcatggctgatttgctggaagcattaaaccgtaaggtatcgagagcgggtaacgagtacgaagggttaactcagcttgatatcgatctgaaaaagattcgcgattatctgggatatgatgtagttctggatggagaattgatttatgttccttccggaaccgtaccaacattacctgaacctgaaacagacatgcctttttctttatctgctttcatggacgatgatgataacgacattgcgttatttgcggaagaagttcgcaaagtatcgtccccagaagaagaacaggccgaagcaaaacgcgaagaagggaacgggatcgtaaacaaatctctgaaagggacgatcaccgaagaagaacagcgaaacattgtttatgttgtttgggatattattccatatgaggtgtattacggcgaagctgaaagtgttcagacttatgatgagcggtttagcctgttgcgtgatatcctcctggatctttctctgccttctgttcgtttgattcagtctaagctggttaataacattgcagaagcgaagcaggactataacaattaccgcaatgacggtaaagaaggttctattctcaaaaacagaaacttcaaatggaaagattcgcgagtagccgatcaggttaagctgaaaaacaaaaccccgattgaactacggatcattgatatctacgcgcacactaaagaagaccataaggtcggcgggtttgtggtggaagatttatccggaatggctcgaacgaataccggatctgggttaactgataccgattatcgttacgatgatgatggtattacccgtgtatacattccattagatgaacgtggtgaactggatcgcgaatacatcatggcgcataaagatgaatacattggggccattgtagaaatggaagttgacggcctccagaagtcgaaaacgcgtaagaaaggggaaccggaatacagtttcttccttcctattatcaagaagataagacgcgataagaccgaacccgacgatattcatgttgtctttgcagatctattttaataaaaagcccttgactccggtcgggggctttgttatattgggcctatcgaaacgtaaatcactaagagaatatattatgactagtagttatcagaaacacaaaacccttatggcaaacctgtccggtaaacatatcgacgaagtaaaatctctgctgacagtgaccgaaggttcccgattcgaaacaaatcacattatcaaaccttctgtgaagaaagtactgaaagtgatttaccgacatccggtgtatcagtgcgttcatatcatgaacagcaacgcatttattttcgtatataacgaatccgatgataagtgtgttggtattttccgaaaacctaactttgaatgcatgagcgaagcggctgttgcaaccccgatcgttgaagaatatccggattatgttcaacgcaacatgcgttatgtgcaatcccgacttgattatgcatacgatttcaattctgacgcggtagaagcgctggcggatatcctttgcaaaaaccagaaagatcgtcaaatgacaaaatatctgactgatccaacaccgccaacaattcgaatttctgttgaagttccgtttgaaaatcatttcatggcagttgaagcgcttgctaaacttggtttagaagtgaaaacagaagccgtttaatagcactttttgttaaagaagcctcttgcaatgcagggggcttttttgtatagtgtgttcattgaaacgaaacacggagataaacaaaatggctcacatgatgaagaaagcagaattccttaacctggttaaagattgcggattcgctcacttgaaaacttttcgtggtagtgtttacctctatgaccgcgaaatccaggttgccgaagtctattgcgcttctaacatgcaagaatctggcattatctctgcaatgaaccaatcaatcaaataccgtaaatggatgggctgattatgaaagttaacgtttcttatgaatctcgcgttaatggcgcacagtggcggaagctggataacggacaagtggaaaggcgcttacctggttccgatgagtggacacttgcggcagtgttggaaaccgaaatcgatctggcaacaaaagacggtattttgtttgaggtgaagaaatgatcacactcagtgattatcttctgtttactgctctttgggcggcttcgatattcataactgctttgatttacaataaacgtgatgattttgggttgtgggtattcattcacgggtttcctctgtctatgtggatcgtgatgactgctgaaattctccattaatagcactttttgctaaaactatcttgttcttgtttggtatattgtgttcatcgaaacgaaacagacaaaaggaacatcacatgaacttcatcgatatcaacaaagatttagaaggtaaaaacatcaaactcgttaaccgtgaaatgttagagagtcttggtaatggcggcgaaaaattcagtgaagaattctataacaatttatcgttgatgactgttaaacgcgttgatgttcagggtggttctggttgggtttctgcaattccggtttccctggtagatcaagcaacatatgacccagttgccgattcatgggatctagaaatgccgttggtattcgaagaagtcatgaagtgctacgaaatcgcataagggtattattatgaatagcggaaaattacaaatgaaagttagcgaagaagaagttaaagagcggttatcggtagcaagaagattccttgaatctatcgaccctgataaacttggaaaatgccctgatacgatttgccttaattgtgggcgttctgttcttgttggtaagtgttgcgataatccaaatatagttgtgatggaaaaggaacaagtatcccccgaaacatgggatcagatccaggaaatcattaaaaaccctccagcgccaaccaagaaattacgtgaattgatgacaaggaaaatgaaatatgagcaaatttaaattgagtgcaaccgttcgccttattcgttggaatggtgaagagatccgttatgatgaccctgaattcgcccatgaaattctttcacatcgtctgggattgaaaaacgcgtcattggttcagactgttaaaacatcagcagatccggaaatttggcgttgtgttatcctggatctcgataacaacattgactatgatgatcctaagaactatccgcttctggaagcacaagttgagaatgctccagaagacagacagtgttttttggttgagttaccacgcgaacattacgaaaacatcataaaggcccgtaaaaaggtcaataacaatgttttcgatctccacctcggattgtttgaggattaagtactgctagttgtgttcgtagtagcggcgctggtaggttcccccacctgtatacattcaagtgtttgcaggtggaaatcttttgatacgtctcgaacacattcaacaatcagatattttcctgcatactcttccccaaatacctcaatgattgtccctaccttaacatctaaacgaccctgctttatatcgaatcggatccggcgttcatagctggatagcaattgcattttagaagcctggaacggtttaccttctgaatctgggttctgaaagttggtatcatagattgcattacggtttgtgaagatccatgtattctctgtgtctgtatcagccagtatatcaccgtacatctttttatcagtcaatgacagactaaagaaactggcgtctttaaacagcgttgtgttatccttatgggtaatgtactgggcttctgtgaatatgacagtatccccaacaaacacgttatcaacgttaaatttgtatgctgggatcggtgtctgggccagaatgtcagttgaacttttaaggaaaataccggaaccatcttcccacagataacagaagtcagaagaaactacactttgcccgttgtccctgatataatcaaatatatcctgatatgtaccatttagacatccaggagggatacgtatgttaccgccgacaacttcgggggtaagtagtttcattttgctatacagtgccgtcatacactctgtaatcgtctgtacggcgttgttactaaatgaacgggcaaacttacgtctgaacgttttatgcagcggagagaggttcatacgcagcacagaacggttcttatcgtcagtatctacgttagagtaaagcaatccgtaataatgttgttcctgtgtaccgttatactggaaagatacctgtatgatcggctggataagttgctgatagattaactgtgcgtcgtatatctgcatcagcgtttccgatgagccgttaatcatcgtcttttcactaaacgagacaagagcgggtagcaattcagtatatgcgttatcaatgtatttttcgtatgatgtatataatttaatcgatgtgactcgattgacgattttttcagccataaaaatccctcctaatatatcctatttactaaatagtaaataatgacccaggttcaatttgaggcaataatgaaaaataaaactcttgataaatttatgactacacggcttgaaatcaagaagactaacgttaaaaccgttcatcttccggatggaacagccattgagatccctaagatgtcgtatcgtcattttgtaaagattaagactctgaaagatgacccagttgcgatcatgcgattcatcattgatgacatcaaaccgcgtgaactgacagcagcggaaattgaatttgtgttgatccatatgtatgcacacaataacgctgattatgccaatacgcttaaagaaattgggctaaatcttgatgacctcaaaatctccgaaccttgctatgattttacgtttgacaacgtgcggttagtctttgacaaacccagcctgttaaatgctcaccttccgttcctcatcaaagaggcatatgttgacggtaagccagtagaattaactgaggataaacgagacgaattaattaattgcctgtaccgattcgaatatgatcaggtatcgcgtggtgtcctccaggaagtatacattatccatgaggggaaaaccatcaaagggcttaacatcattggtgaatgataatggctaactcttatttcaacgaagaacaaaagaaaaagtttctgaacagaaacagcaacaaacaaccagcggtcaccaaagtaacagcctcccttgatgctgaaagcgcccgtgacctaaaggaaatcaacgataacacccttgaaagtgcaatcaatactcttgatatcaaagaagggttgaaatcgttcgaagaaaaattccgtgacaaattcgcggggttcaaagaacaatacgaagaggataaaaaggaatcattagccgaacaactacctgatttcgtcggcccgatccgtcctatatccttaaccgatgataactcaaaaactgttgacaatacagtaaacgttaaccaaaatggtcagttcggtaaactggaagaaaacaccgaatctatttttcatgctattaacaaacttgttgatttatatgaaaatactgataagcataagccgcttcctgaaccagtggaagaacctgatccgtatgtagacactaagaaaaaacgcatcaatgatgatgatgacaaaagaagcaaaactctggatagtattgctaaaagtctggtttctattaaaggttttacatcgcagatccttagccgtttcattggttactctctggaagcaatggcaaagtttgctaaatggacgctccttattggttcgttaatctttacattcgatgtgttgcgcgtcacaatacgcaaatggttcgaagatatcctgaaagaaggggaatcctcaaagaaactatttggtacatatctgggtaacgtaaaggctatcgtaacaaagatcgaagaaggtttgaacaacttcaatatgaacaacttaggcgaatcacttcgtgatttgttcgttgagcctatgaagttgttggggcaaactgtacaaacggcaatcactgagggtatcggtcgtcttattcaatcattgggtgaatcaactggcatagacagcattaccaatgccggacgcggaatgcagatcaccgctttacgtgataaacagaaatttggtcttgaattgactaaagaagatattcttatgatcaagaaacaggaactagaagaccaaaaagcggcattagaaaaagaagataaagctattgcagcacgtcatgcattaacaataactccttctcaaattcctaatggttctatctataaagttgctcctactgattatcaagaaagaaatcagaaaaccgtagatgctgataaagaacggcttgataatatgaagaaagcaacggaagaaatgcagaaacaatacgatttagctaaaagcagcgaagaggaagcacaaaaattagccgatgaggaaaacaaacgcaaccgcgcacgtatagaagaagcaaaaaggttagaacaagcgaggaaggaaggaaaacagccgccagaaggtgaagagaaaaagggtgatgatctgttgggtaaagcaaccaactatgctaactctgaaaatctggatgcagccgatatcaaatacattaacgatgaactgttggatcagcttgaaaaacgtcgtaatgaaggcaatctggacgatgtacagaaggatagaatctctgaccttatcgagcaattgcaaaacaagattgcagcccgtacagaatccagcgccccgatcgacgcacagccaccgttagcagcaaataaaccggatgctgataaagcaagcaacattcaggttaacaacaaaactgttaacaacaacgtaactcattcagtacaacgcacagagcataaaccgctcgtagcgctggcataaggaacatataatgaagttttctattattgatgacagtataaacactctcaaaaatattaaaaatcgcggtatcccctctgggggtgccgcaatcacagaatcagtattaaagcaaactatcgttaccgccgaatttccggcccaacgtgcagcaggtatcgataacgcttataatgcttcgagtctgtataataacggccttctgttcactgcatatgattttaatggtgttggtagtaaagacaactatcgttcattacgtcaggcagcacagaacccaaaacaaatactatcatctgcgactggtaatgttaagtacaaacaagtgttgaatagttctattggtactatggaacctgtttgccagatcctgctaccgcgaagcctgaacgataacgaagtaaacagccaccgctatcaagatgcaaacgatagtttcttaaccaaagggttgagccgtgttgtttcaaacatggtatggggcgctgtagaatccgtttcaggcggtattatggcagaccgaagagaagcccttgatgttggtactaaagccgctttccagggttctgacaagcgaacaaagatgtattacaatacattcgtgatcgaaagccgtaatgatttgctggaactgattaaaatctactatctgtttactgttctgggatatggtacaacttctggcggtactgctaaagaggttgctgcattggttaaacagtattacggtgttctgggtgctaaaaccgctaacgcaattagcccttccagtaacccagtaacagcgtcagattttgataatagtctgggtaatgacgtggttgatttcatttcaaacgtagaggttattaaatcgcctcctgtctggtttattcgtgatttccagtctggggattccttgcgtttacctcattcaacctttgggccagcaggtattaccagtgttcgctttggtcgttctattgataatattgtaaatacattaagagaatcaccaaataccccgatctcacttgaggtcgaaattcaatttatggaactgatcgatatgcgtcaggattctatttttgatacaaattactaaggagatatgatgttttacaacgtagatgaatttttatcaggtatggctaatcgcgattttcagcgtagcaacctgtttagcgttgtatttgcaaccagccctgcatcacgtatccttgacaacacgatcggtagtattcgagatactttgattgatggatctattagttctatcaacgcaaacaacccgaacgaattcattaatgctatcactggcggtgtgagtaaattgtttagttacaccgtcgataaggcgattatgtcgctgaacaaaacaggatttagcaaaatcatcggggcaattagcccccgcttgattacttccctgtttggtgatagcatgtatggacagttgttagctgaattccgtgataaaatgatgtataatatgggtttaagcatcatgggagttaacctccccggtaaatccattgggtacgaatacgtttataatggtggcgtacctcaaatcagattcactcgccctgagaatggggaattgtcgctgacgttccgcaccgattcagaagcccgtaacctgaaaatctttaacgaatggatttccgctattcgcgatgatgtaacaggacaatacgccttcattgatgaagtgacaagtactattcaggttaacttacacgatcgtgatggttcaccgcatacaacatacgtatttcagaagtgcttgcccgtcaaaatcagtaacagtgaattgagctatgagaacaacaacgaaatctggacatttactgttgattttgcctataaaacatcatgggttgttgaggctgataaagaaggctgggaagggttcaaacaatccgtagaggaaggtttagccattgcagcacgtaccgcaattacaggacaataaaggggctacggccccttttgaggatcttatgtttgatattattcgagtaacattaccatcagggatcaaacgattccctatgtttacagttaaagaccagtttaaattaatgctgacccgtattgatatggaaggtcggccccttaaagagcaacaggaaatactggatgaagtgctggatctgctttatcctgggtattccaaaacagaacaggaatacattttcagccgggtgtattgtggttcgttcggtaaaaacgttatcaaggttgtgataggcggtaaaggtgggggccactccgaagccttcatggtgattaatgatattcaactagaaaatgaatacaagttgaatgatgaaatcacattagggtttaacttcccccgtacacgcaatacaagcgaagagttgtttcttgaatgtatcagttatgtaatatacaacgaacagcgctatgaatggacatcactaaccgaagaaacgaaagagaatattcttgatatagtcgaacttgatgatgtcgaaaaaatagttactatgctaacgaaatcggttgatgtgtctatgcgcggtaaatcatttagtggtatgttaaccctgttcaagatcctgtttagtcgcggggatctggatgaatttgtgaagaccaactatctgctaaataaaaacggcctgaacctggaacctatcatgaatagtagcccgatggaaaggcaaatttatactgcattgcttgcagaagacttgaaaaaacaaggtgctgttaaatgagaaagcatgaatataaacacgttgagaaatataatgttgattatcgtcctctgacacatacagagtttacccccgatgtagattttatcaaaggggatgtttacctgtatcaaagagaatatcttttcattctggcacttctggaaagtaaaaatattgatacccgtcaactgttcatcaactgtgaagaatgtcaggaaagaattgaattccagcttaaacgcaatcaaataatggttgaagatttcgacgataagctatacggcaatgacgggatcgcgttatctgttcaccctcgtaagactggtgatgaagagatccccgatcttatcgattacgtaatgatagacggcgaacagatcatgtggagtgattgcagcgacaaagataaagaaatggtgttggatgcaatcgactatgcaacctataaatcgatttctaccgcactggataagccagcagtggtcgcaaacattccggtaaggtgttcgtgtggacatagccatatcgtctctctgagaggcttacagcaatttttaaaggtggtctaaatgggtgtaaatctgaggttgctatatagcgatatagaacctaacatgcaacgagattggaataatgacgtagcggcctcaaaaggggccgcagcagtgagaaatagtttgattggtatcgtaaccacgatcaagggtacacgtccatttgatagtaactttggttgtgctattagtgatatgctgtttgagaacatgaaccctctgacagcggaatcaattagaacttctatcgtatctgcgatccggacatatgagcctagagtatataatctttctgttgaagttattccacagtatgatgataactcagtaacagtaaccatctattacagcatcattgatgacccggatgacgtagagcaaatcaaactacagctttccgcatcataacaaaaagccccttcctttcggttggggctttcttttagaattcaatgaatcccattagtgtttgatatcgcaattcaaacggggagatataactttgcatctggttttgatcggatacgatgtaataatacacctcatcattatcatcatatagcgcttctttgatgatgcaataacgatcggtttccacgttcacataaagagtatccatgtactttgtaactttggaaccctgtgaactgatttcacgaatagcgttatctatgaaaagcgacaatgcttgcatgaagttatcaaactcaccatattcacagcccataatagaaattgcagtgtattggtgccagcctttgattgtgtctccacggcggatccatccaatttgtctacccccgatagatacacaccacactttaccaacgggactatagaaccgcacaacttcttttaataacagggacatgatcccacattttgtataaggattcatttcaacctcatttcatatcaagtagccaggaagggctagtttcaagcgaaattgcagtatattcgtattttacagtataacctttgaaaccgaaaggaatgactgcattttcattgagatattttactttatgctttgcttcttcttcattcagagcagcacagactgttgtttgttcaacgttaccagcaggagaagtaaatttttcaatgataatgtatacgcagttcatcctattgccctctttccattttttcaagtttcagtgtatccacttgtagttgaagtttaagaatacaacctttcgatatgttatacaagtagtcactaacgatttttgactttacctgatcgtaatcagaagataacgtaatccaatcatacatcgtttggtatgatggaagatacgtacattgttcttcttttgataacgctttaaatgattggtaatcggttggaggttccgaagcaattgcggttgtggtcataagactaagtgcaagtagtagatatttcataatgtattcctcattgttttcgatagaaccaatatagcaaaaagccccgaccgaagtcaagggctttttcatcaatgcaagaaagatttcacgtactgttcgatcttttcacgacatgtatcaactgaggtgctttccgcaattacggcatgacataacgcctcgcctccgacccagaaactcatcatgtactgaatatcacgaccttccatttctttttgatgcgctttgattcgatcgaaagcgttttcgattgtttcagtagcagtaagcatttcggattccccgtcaacctccgccagttccccatcgatcatttcgctttcgacttcttcccagtatactatcgttatcatgcattaccccagtggttaaccgtcgtaatccccgccacaattcacatcgccttcaatgaacagttcgcggttatcacgtaataaattatactttctttcgagttcaggcccgaacgcgtcggcgtcttcataccagctataattgtatcttccgcattcatcatcatattctggttcatcaccgcgctcgttgaagtgaacaattttaatatcgtccatccccagttctttcagcttatcccagatatacgaaatctcaacgctatgggaaccgaacgcttccagtgagatcgtaccgtcgctatcgacttgaggaacaccccacttcgaacgagtatcatcggtgatcatatctattaatgactcaatattattctcaccgtagatatcagcaacttccttttctttaccagggcgaacaagtccgatcccgataataaagctactgcttgagctattgctcacaaacccagaacgaattttcatcgcatcaccatattaccaatcatgaatagagggattagcgcgaagacgataccccatagaatgaccttatcttcacgacggtcacacccataatagataacacctccagcgaaaatcaatacaacaactgaaacgaacgcgaataaataaatcatttgcaggtatccattctcatagaaacttctttcaggatcttattcagatcgtgaagcgcatcttttacgttaccttcgttataggtaagcatatcctggtacagccctttcaagcaacgattgattacatatgctttttcagaaggtaacattgtaccagagcgattataatctctgaaaatgtccatcatcgtgccgttgttaccaggtaatgacgggttgaagttaaccataccggacatcaaactatcaacatacacaactgttgtgttatcagaacgatacgcgccaccaactttaaaccagttgctgaacacatacggagattcccgcacttcgctcaaatcggttccgatttcatcgatgtttacacgaatgttgttaaaatacaccgattcatcaatagaaccatgacgccataagatagcaccattgttatttttgaatccgactacatcaacctgccagccgttatctgttaaccggacatcatcaacgacgatgaaatcaggtagctgtgaatgaaagccgatgttttcaggacgggaattacgaaacccatcacgattggagaaataaaggatgtcgccttgattcagttcgcatatattcataagatttttaaagtccaattcaagtaattccacaagtcacctcaaagccccctttcgggggcgagatctcattagagtttaacttctttttcttccagaacgattgtgcaatcaaatttcacatctttccagaattccgctgcaacgatatctgttgcggtaacgcttacgctggtttcttcgaaatccagatccgcaaaccatgcgtgtccgacgacaataccgtacattacacgactcaggcgattattaagggcgcgaacctctttaatagtttcctttgtctgcttatcaagatactcgatcaggtcattcttgtcaagcgcttcgatctctttagatacggtatcgtaagcccacagaatgatcaggtcgccattgttgagtttcttcttaccttcggcgcgttttgcaacggtagccgcaacagccggaagtgatgaaacgcctttgattttcacgttcagttctttcgacatgtaaacatcagtcgattctgtgcgctcaaccttcggagagaagccgtaatcacggatcccttgctcagacaaccattcaccagccgcctcaccaaagcgctgtttaagcccttctgcgttgcgtaaaccaatcgcgttatcacggaagaacttcattaccttctgacggcctttcaggatttccagacggacgttatcagcaacaaattccttaccagaaataccgcgagtcatcgaacggttaaccagaggcagagaggtaaagtcaaccagtacagacatacggtcttcaccaattttagccagcggtttgatagtcagaccagaagcacgtaagtttttcagagtcggaatatcggtttccagcggaagtaccttaacgttcacgataccatctttaacaatggtaaagttacgcacttgtttggtttctactttttccggcaatccaaactctttttgtttgctttccggaatggttacataaccttgcagatccgtattgatggaaatgttcggacgggaactgttacccaccaggtgtttcactgcaactttcgttgtggtttgggtaaattccggtttccatacttcatgcgctaccagttgcgccgccagtgctttacgttcttccggagtagaagcgtttgcaatctgttctgacagtttatccagagtatcatcatctttctggacagtctgacggcctgtacgattgtacgcccagtgttcagaagacaggtcgatcacggtgtcggtttctgccaacagttcgagagcatcaaccaaagtaaacgcgttttcatcaggaaccatgttgtagtcaacaccatccatcagacgtttagccggatcaacaaccgcttcggagatcatatctttagcgttggaataatcctgtttggtaaagcagttatcgtatgctttaatcagacgcacatcacccagctttttcagaactttccatgccagatctggattcatggtatgaagcgcatgatacagaaccacatacagaacctgttcaccttctgctgttgccggatcgaagccgtcaacgtcattgatcgcgttttcacccagcgcccaaatgtttttgatatgttccggaaccagaacaacaccatttgcagcattcaggacatacacacggccttcatccaggtagatcgcatgagttgcatcgccaactttgacttcaacacgtgcggaggtttgcgcggtaatgatttcatcaaatgcaggtacatacgcatcaaacccttcaacgaatttgtgtaatgcgttggttgcttccgccattttttccagcagaggacggtttacataataaccatattccaggaaagcaatgttgttaaacgtcaacggcagagtagaacacgctttcaggatatcatcagtacgccagcagttatcataaccatcagtcaggaagatcagactgttcagattgccattatccgcttgcagatcggtagcgacttcaaccgccagttgcagaggttcaacgaagccagtacatccggtcggacgcagataacgatcgatagcatcattgattttgctcaggtcggatacagagctaaccttttcgcccacgaatacagaaccgaactgaccacggctggagaaatacagaatagatacggtatcatcctgcttaaccagcgttgccaggttgtttttcaggtgctgacgaatgcgcgggagttcgttatacatcgatccggatacgtcacaaacaaaaacgtggttagtcggggttggtttggctacggcgtttttgaattcaatgttagtgatcataattttctcatttataggtaaattttattaaaatttcgtttacttttttgctaatagtatctaatgcatcatcgcatccaaacttactactcaacaatgaaacaaaatcatccatcgttgttgtttgagactcgccaacgtcaaaagacagagcgtaggcaacaggatttttaatccttacgatttgaatagtatactcattcaggtcaaaccgttcaagatattttcgcaaagaaaataaatcaatcggtactggtagagtttgactaaacgttatttcttcccccagttgataggggggcatttttacacagatttcgtattccatcagtgatgactcttcatagtgtgttccagattacggaaaatttgcccgtgttcaagctgggattggaattctccgcattcatcagagtaagtaaattcataatcctgattgccaaatttagagttgtactcttcatacaaccacatcttgatcagagcgtctttctcttctgtttccagatcataccagtcacgcccatcataagcaagcgcaatttgaggattagaccgatatcgagtttcggcgctatcttcggtttcccattcataacgcttatcatcatagtatgattcgaagctatttcccatatgaccgcccaggtcgcggtgtacctgctgtacaacttcttccgctgtcgggcaagtcatccagctataaccacagttaggaacacagtcacccatcatttcgcggagattgttgatatcagtcggatccttcgggaaccgtacaataaagctacttgatgaactattgctcacaaaaccagaacggattttcattataatttctcccactcaaacgttgtgaaatgttttctttcgtcatacccaacagtacaacaatgtgttggctttcctgtgaatccatcaaacacagttatacaatagtaatgcaaagatggaagcggtgtatgcttaatgtagttgatcgcgacgttcaggtcaacagtagaacatacacaatcagacgtttgatcaaaacggccatcaaaaatcaactcaatgctatagatgttcatctttcacttccttcatatttttcataacttcttcaaaagttacggggatttcgttgtactgtagtgattcatcatcccatacatcgcgatgcccgaatgttgaactttttgcaatgagtttttcattttcccatacatcaatagtaacatgatcaccaagataagggaaattaggaactttgttcagcacatcaacacagttttgtaatgattcagaaacatgaacaatttcagtgaattcataatcagcactataagaagctacgtaaatcatcaccaccccctaacgatgctaatcaacagtaaacccaggatccagaacacagcaaccgcacaaatacgggccattactacatttccgcgactagtccactccgcactaaggaacaagagaacaaacgttaacgcgtataaaaccatttcaataacttcggtaatcatataaacctcactgaacataacgattgtagttgatgtgccacatgagactagacacaacatcggaaacaatcaaaaggaacaaaccagcaatcattatcaaaaggataactaaccaagtggttccgatattttgttttaacgacaatagcaaacacataatactgacaaaagcaaggaaagaaataacaagcatcacgattgaaggggccataatataaacctcacgaaaaagccccaaaaggggcttgattaatcaatgtccgaacacaccacgaatagactctgcgaatgcatacagttcaggatttttagcttttactgtttcgatttgctccagaatgtaatctggcttgtatttcgcaccgaaccagcagtaagagaaagagcgatcccacatgaacacgttatagtattcaccgttacgaacttcaaccatcacataaccaggattagaacccagcggataatctttcagaagattgaatttcgcgccagcaccagtacatccgttaaacaggtcattaaaagtcatggtatgttccttttgtcagtttcgtttcaacaaggtcactatactattcttcgttagcctatgcaagcgcttttttgatttgttttgcaattgcttcgatcaccggaacagatacagagttaccagcttgtttgtacgcctgtgttttgctcttatgcatcttgaatgaatccggaaatccttgcaaccggaaacactcgcgaggtgataacattcgagggttcttaccttcctgcaataccagacattgaacaccatccttatagtattgggctgttatcgtcccagtacacacagaatccaccataacggcctgataaccaaaccccttgccgtttgccttgtttcgttctttacgctctctaaagcccttccaggcacgatctgatatggtgtattgatcattatccggttcgagaatgtcaccgacccttgttggggtacgtggaggaacaggaaaactaaagaacactggatcgcgaaagcagacaataaacacacgctctcttcgttgaggcaatccaaaatcttttgtattcattacctgataatggatatcgtatccttcgtcctgtaacagcctgtagatggttttaaacgtgtttcccttgtcatgggttaatagctggggaacattctcaaagaacagcacagagggctttttagcccgtataatgcggagtatttcaaagatgatagtaccgcgaggatctaacatgccctgttttaaacctgctttactgaacgcctgacaaggaaacccagctaacaggatatcatgatcaggcacatcattttcatcaatggcgaatatatcaccctgaatattttcatcgccccagttatcagcatatgtttgttgtgcatgtttatcgatttcagacgttaaaaggcattcgaccccgccgaatgccttatcgaaaccgagcctcacgccaccaacaccagcgcaaaggtcaattattttcatacgtcgaaatcaacctcatcgattttgtatgattcttcgccaatatcagcccatagctgaatattcacactttttgcatcacgataaagagattgaccacaaagcccacctgtataacaagtttctgtaatctcgttaacttccaggcggaggctattgcgcataattttaacaacagccttttccattgccgaatctagggttttagtatcacccaatactacatctttaacgttcaaaataacatcactcattatcgccactccgtttcaattccgtgtttgtatgcgtcaacgcccagaggggtgatcactaaacacatatcagtatttttcgttggtgaactaaacgccattgatgcgtaacctttttgaatcagggaatcacgccctgatttactgggaacatcgttgaaatccaaatccaacatttttgacgagtatccgtaaagtttacacagaacatcaatttcagcgccggataatttcggatatgtcatttgtagtacctcacaacatgttcagaatacacacgttcaatgaaatcattccagaaatcgcgatcaacttctttcggataaccagatacagcagccagtttttcaacttcacacatcgttgattctagcgcctcttgtacggttgcgaaaggaacaccgccagctttaaccattttcaaaaatgcgctatccggaagaggatacacaatatcaccttctttgaaaatctgaatcaattgcataccaccgcgcaacgcatgagaaagagctttccagtcgatcccgttgttggcttctgcttgccgtgcgcgttccccgtattcatcccagagtttatacacggattttttcatttccgctacggtgatcgtagactggaatttacgccccagaacttcgtaaaattcctgacaacctgatttcagtgttttgtctgtaacgaatcgacaaaactcgttggtcgggaatcggttagaaatctcaccaactttgatgcgcttgccgtagttagattcatctacgttacccagcaatgatgtgccataccaggaatcaggaatcgtctgtaacacatcgacaacttcacgcagtgcagccaggcgagaacctttaacgccatacttcgccgcttgcttacgaacataaccaaacaggccagttagttccgtagtgtagaagcgtgaacggttagcgcggagatattgccagatatcagagttagcgatcagtttgctatcatctgcatgaagcatatcaatcgccacggtgtcaccatcacatgcgaggctaataaacttttgcagactgtaaatctgacgatctacgtcattaacaccgttctttgagtttttatcgccagttgatgtatcgatagacttcttcgcagtgcctaacaggatttcgcgaggatgagggagatagatccctttgtagtctttatcgcttgttggtgtttccagtccgtacaggtgagaaccgaatacggtttccataatcattttcatcagaattcaacctttaatgtttttgcgatcccgcgcaattcagcggtagtaatatccggaatgtttgttccgtagctattcccaaatacttttttaatcttatcacacaaatcgcggcgatacaccatttctttgtattcttcttcgctacgatacagttgataacccatccacccctcagcccacccggaattgcgcttgattttaatattagtacaacaatcagaccacaggtactgacgcgcaactttttgtacgtaaagggttttggggttgcgattttgtcgctggtcactacggatcccagcatcatacaacgtatcaccaactttcacatcacttaaatcaatcatttacgtctccaacaattagttttttcacagtagtgaacgggaacagacacgcccaacgtttctttactgcttctgttgtatgttatcacaatgaatcgattttcgccacccctaacacactccagatccaaaatctcgcgggttcccttagtgttcatgtctgcaacatagtattcttcgttgttgacaatcactatatccgacataatcaagcgaggtttcatgcagcatacacctctgattcatcaagccattccagattctgattgagtgattcaatcagctttttatcgcgtctggaaataacaacggtagaacctttttctgccttcgcgatgatatcaccagaagaagtgatgtattcaacctcataatcacggcgagggcttccgagtttatcaccagggactacattccgtttaacagattcatgggatttttcggtgaataccaattcattctctacatgggtaacaataccatcaacagcagaacgagaattaatataaattttgctaatttccgccatgaaaacactatctctcagatatcgagcagtcactttatctaaacactgagaagacactttatctccgccaggatataccgagataatcattacatgaccctgaacacgggcggttcctactttatgcagaatgtaaaccgttgaaccatcagaatctttagatatcaagatcacactgaatgattctttcttttccttccgagtttcaccacaggtaaaactcacatccagaaaatcaccaactttaacggcacggggttttgctacttgttcacgaacactaataacagggatcataatcatttcctcacagtttcaaattcttcatcagatttccaatatacgttaaaattacgacaatcatgatcggatgtcaacgtgtatttttcatttgttttttcgtcagtgataaccatagtttcattctcgatcgagttaacaccgtaaacgaaaacattctcaccacgtttgtttaaaaacgcatcacccttttcaatcaactgccaacaggtaacaggcaaaccacccggactaaccgggcgggtaacaagacaatagggatgtttaatcatttaaattcttccattgcataggaagtaagatctttgaaataccttgcggtgttgccttctgggttgtttgtaatctccatcaggataacagcactatcaactcctgctttcttagccatgaatgaaagggcttcggtagcaataatcgttgctttcataacatcagctttagaaacgttgattgtattcattttttcttccttttcattaatcacttggtatgtgtgtataatacaaaagccctcacgagaacgcaagggctttttattaaatttcgtataaatctggattcacaataaccgcacataaaagatcatctatatgtgcggcttcttgttctaaggtttgcttagatgaatgtgctttcaagcaacccccgtaaaggcgtttactatctggaaatgatcatcgaagaattccccttgtcgttgcacgacctcatgcataggtagccagaacgcgtctgctgcatcatcagcaccgcccatgatacgaggcaatgaaccatcgttattaggttcgagcttgatatactgtgctacagtcggttttgagaagtacaccgaacgtttcggatgatcgaacagcatcgaattacggatagaaccacgaataaccttttcaggtactttaattcgtacttcttccagcaattcacggatcgcgcaatcaaggaacgtttcattaccgtttttgtgtccacccggaagcgccaacgcatctttaccaggcgcaaacttacgacgaattactaacacgttgttattacatacgaccactgaatcagccgtgcaacagttcagagaatccggatacggatattttttgaacttgtcaatctctcgttgccagtgtgtatcttcatgggacaaacgttggaattcttttgtttgtgtccattcatcgataaaggaaaccgtagtgctaggcgcatattttaacaaatcttcgtcccagccttcatggtgttcccagataattttgcgtaaattggtcgaggacagatcctgatctccaaccttcacaggttcaaccggaatatgattccatccgaatgctttaagccagtaagaatctttgtctttttcgtacccgacgatcgcaattcgatcatttcgagtttcatcgattgccatacgaacacgggatttccatttttcctcgttatagaggtaatccggaatgtacgcgaatttgattctggctgcatcttcaacatcaagtttgcagatagaccagcgagtgatcattgcttgacgctgtttagcggtcaatgggtttaatgtgttcggatatgcataagcagaaccgatcagaatgtaaaccgtatcagcaacagcaagggcttcccttaccattttctcatgaccatagtgaaaaggttgaaaacgtccaattactacagctttatcatatttgtgtttcataacgtgctccacgtttaaaggttaatcataaaacagacgcaattatcaacacaccaaacaatccaccaacgaaaccaaagaatagtgaaatgagtatagtcagtacgatctgttttatgttcattatagtattctcgttttagatgtcaagcccccaaagagggggctttaaaacattatttacgagaatcgaaaatcactttaccagcataatccgaacccattacagtttgaggtacgccacctttatagcgggtagagtagttcatctgtacatccagttctttccagcggatcatttccggtgtaatggtgcgttgcagggcggcgttggcttctgcttctttcttcgctgcatacagacgggcatcagcatcacgttcgttagcgattgcagcgttttcacgcgcctgacgatctgcttccgcttgttttactgcttgtaatgaagtctgttctactttttgcagttcagctttagcagcgttaacctgttcttcgcggatcttcgtgttagttacctgttccatgataacttccggcagggtgatatcctgcaagaatacctgtttcacagtgtaaccgtaaggccgcgcataatcttctacttcctgctgaatcgcaatttgcagttggttttggatcttcgcatcaaacaggtcttgcgctttcggtacggatttaccaaattcgcgaacagtggaaagtagtttttcagttacatacttatccagtgcctgatcctgattacccgcgttgatacggttaatcggtgctttgctaccgtcgaattgcagcattacggtcatatccacagtggatttaaatttatcctgggatggaacctgtaatttgtcgaacttcatcgcgatgtctttggtgctgaacgtgtcgaacgttgccagcgggtttacaatgtggaaaccaggcagtacgggtttcggtgatactttacccatgaaggtttcagttttaaccgtaccgtcttgcacaatggtatacatgttaggcactaaccacagtgctgcaactacgcccagagcgatcagagaggttttcttcgggttgttcacgatagtgtttaagttcatcataatttccataagttgttgttcaattcgatagttattctatcatcacatttcacgctgtcaaactatttttaagaaagttttgtcagcttgtagattgtttgatagcacaagcccttaatctcgtccaggatgttcttcaaagaactatctactgattcgtagatctcgtttgcttcgttggctattttacggagatacgccaccgtgtcaagcacattttcggtttttagcacaggtttgtatcttcccgtgattcctatgtggatttcggtgaatttatcaaccaaatcctgcatatcttcgtaaaaaccctcatatgctttatgttgtgagtaggaacctgttgcaaaatgtgcgctatgcatatacgtaacggacataaggcacatgccaataaaggcatctatcttgcttgagttctcggattctgtaatttgtttaaatgattgcatgatgatccctttatgaacgatggatacttgcaaactcatacgcgaccctgattcctagctttgcgcattcggattcagatcggcattgtttttggtgccattttcgttccatgtagttgtagaatagttcgcttgtatttacgctgggagggatcgttgtgatgtatacttgaagggccgcattaatataatcgtcaaattctttctgaaccggacggtcggcggcgtgtgttgtgggtgtcatcatcaacaatccgaacagcacagccattgatatgcgtttaatgttcataacaattactcttttactcatagacccactataggtctactcctgtatatatttatagcaaaaacgaggccgaagcctcgttataatatttttgctgtaaagtcaatcaagtaatgtcataccaacacaaacttctttcgaaagcgcgtattttgttcacgttttctacgttttcatcccaaccgatcacaccagctttcatacgtttcagttcctgacgtaaacgggtacgtacttttgaatcaattttctttactgcaatagaaagcattgcattcagatcgccatgagctttgttaccgtcgcgacacagattattatcaaatcgaatgtatgcacatcctgatttgtgtttccagttggttgagtaccaacgcaacccatccggatcaatgccatgttgagcataataacgagaatactcttttacttcttcgatcttttcgttagatgaaaggtcacgaagaggattgtatttcttacggtaagtgcgactcataatgatctccttttgtttatgcttccactgtatcagggttgttctttagttgcaagtaatgttttcgacaaagtgaaacatatttgtcttcggccccgatctcaatctggtcgccattagcaacaaattttccatttgcatcaatacgggcaacggtagttgctttctttccacaatgacaaactccccgcaactccctgatctcatcagcaagtgccagcaacatataagaaccttcaaacaagttcaactgaaaatcggttcttagtccatatgtcattacgggtatatctaattcgtcaactacccgacacagatccatgacatttttcttggaaaggaattgtgcttcatcaacaaacacgcaagaaaccagattctcgctatcactgtaaaaatgattgttgtgaacatcataatacaagtccatatcaggcgtgatcatggtgcatgttgcttccaacccaatacgcgaagagatactctgtttaccttctcgcgtatcaattgctggtttgtacatcaggatccgcataccgcgttcctggtagttgtatgcatcagtgagtaaacgagcactctttccagcattcattgatgcataatgaaaatatagtttagccatttatcctctcaacaaaatctggggtattttggaatttcccttccccttcatggtttttgcatgttttatttgaacagtagatccaccaatcccactcatcataagggggtttggtaatgttcattacacaaattaaagggaaatgacaatcccgacagcgaacattttctataatgtttgcgttagccatgcgtataaccgcccatttcgctatcttgtgcttgatggatatcaagataccacatattgattttgcttttcagttcgcccatttctttatcaagcccactgtcaacaagacagagaatgtcaaccaccgttttacgctgggtgatgttgattttgttcgctttcatcgcttgcgccaatgcattacaggttttaaccagtgcggcgcgttgtcctttgattacggcgatccgtttgttcgctttcttaatctgccgccctgctttgataggatccatcatgattaattcaccttacgaggatcgaaatgaacgacaatgatcgggtaatcaccagtcacctcattaataatgcgcttaatgagttcccagtcgcccccagcgagtccagcaccgattaaaggtgtgatgataggctttccagtcttaacggcgtcagcaagccctacagcctgtttaaacgcattgccgattgcgtcataatcgacacgcggcccaggtgtccagaaatcatattgagtatatgcattgaaaacaatgttgcctttttcgccaatgtaaacagaacaagttccgagcttatcacgggaaccttttaacgtgttggcatcaacttgaaatgcaccaggaatacgatcgcggatttcgcgagcaataccagcacccatattgcaataacagttgcatccgtggatcaaatggccttcaccattcagatacatattcacagcattacctttcacttctttaatgatcatttttattattcctatataattcgcgttcgattagcatatcgatgaaatcagtaatatcatcaaaccaatccttagtttcttgagcatgagccaaatcaccatcatctaaaaacttttcgcgagcatcagcaaaattatctagtttgttatagagttttgctttgtctatatcattcataaattaaccttaattattaaaagaacgtaagaaaaatacgtaatgtcacacctgtttacctttccgttcacggcggcgatcttcttgatgacacatatataaaacaccaccaaaaattataaaaccgataacaacgcctataaagtatccagcactaaacatagtcatcatccccgcaatagtaacaaggcccagtactctcatgtttaccagcattgtacgccaagaacaccacaaccgccgccataataataaaaatccagatagccattagtaaagccctataccagcattgaattcatcaaccaaataagtgcggaacttttcacaccgttccttatttggcgcttgtttgcatagattcatcattggttcagactgcaaaaactctttttgtttcagcaacttaccgcgtttatacaggtgagcattttcctctccccacatataagcaacatctaactgttctgcgatcacttgcttacatactgcgacatctttgatatcacgattgttgcataactcatccaggcgagcatcacccgcgtgagcaaatccagcaaccagagttaaaagcagtgctaactttttcatgatgattccttattcatcctcttcgataggggtataataatgcgcattgcagatatacgcaagaacttttttcagagacatatcagagaatgtcggatcctgatttcgtctcatcccactaccagtttcaacagcccaacgtttgttagctggattgtatgtcagccagtagcaatcccattcagacagagtatgttcgaacagatcgaaacgcttacgcccatttgcttgcggccttacaaaaggttcaaccatttctaaagcggttaacactcgattaatgttcgaaccgtcttcatccatcgcaatccgcaaacagtattggttaatgtccggatccataccatcgatacccaggccgatagattcgaaaaattttgtcgccgcgtgataagacacactagaagaacgatattccaacatcacagggatcttttccccgtccttgacgttgttaatgatatcctgatcgataagttcaatcaggtctcttttctccttgatcaaggtagaaatttcttcttgcagcggggctatcttcgcatgaagttcttttatccgttgatcaattacggacacttcgaaagctaaatttctcattgcacccattccccgtttttgtcgatgtacatgatccaatcagcaaccgcccaatgggaagtattgcctttcggagtcgctacgatgtaggaaccagctttaaacagtacgcgtttagtttcgttcaggatcaggtcgctcataatgtattcctctcaattagatgcatccataataaaaaagcccccgaccgaagtcaagggctttttgtcaaatgatttgtttttcttctaacagcttcgcggttgtattaaccatacgagcataatcacgggcttctttctttgtatacttgaaaccagcgttatagctcgccagcgcctttttcaagtcgcctttgtggtaatcaagccagtactctagttcatagatcgcatactttgatccaccttgaagagtttcgagctttttgattactacgcgtttaggatatgacttatccattcgtgcgctggcgctccttgcggtaacttgccagcatccataagcgtgatggccctttttacctttaccgacattctcacatgcgcgagactcgatccaggcaatagccgctaaatgatagcctaaacgtttagccttatctttttctacaggttttgcagtcttcaaatcatagttgtgtccaactcgataagcatactccagaacctctttctgcttcggtgtgatgttatccaaatccttgatgtaggatggagaatttttgtttgccggaggcttcacagtagccttttgtaaaggcaattgatgagtaggcaaatccgcaatgaaatcccctagcggatccgttgcagcgttgccagaaaaagagcacaagaaaatgctggcagcaattataattttcttcattttaatacctatgttgcaaaaagaggggcaataatacaccccactttatatttatgcaactattttagatagtttttgcgtcacgtagtttatcggcgataaactcagcaatgttataatttgaaatagccttgttaggatcgtatagtgcaatgatttcatctaacgataccataacggcatgtttaaagtagacgctccagctagtagtaaggatctcgctgttgtcaaatccacaatcagggctgaacaaagcgcggtatttgtatccactgtatttcgtcagacgattcgtgctgtgcgcgtcactggtgatcagaaaagttccctggtgagtttccacaacgaaaaagtatccgaggcgttctttgttgtccagcatcttttcaaacttgcgatcggtttcttcgcgaacaatacgagaagtcagcatttccaacactttatcgtattcgggccaatcattctcgatcacgatcgcatcaaatggtttcttaccattaatcccgcgcccgatttcgattttcgtgcaaatttcgttgaacgttttcaaatcttctggcgtcagttctttaagatcgctcaattttgctacataataacgtttttctagtttcattttacggaaacctcaattcaaaaataatttcacagagttaccacatttaggacatgtgataaattttttcacaacataatcagcagcagagaaaaatccattgtaaatcgcttctctcttttgctgtatatcagatagttcatattctaacccacttttacagcaactgcaaacagtaattagttttgggttatggatgacagtaatcatatacacctcacaaaagggggctttcgcccccatcattagaaattgtcttcgacaaacgccgcgagacgggaacgatacactgtatcaagaatgatatggcttgagtgttcgtattctttcagcttttcaacagcccatacaaacccgttgtttacggcagtgtttcgagggttgtcgatctgcttaatgttcccgcatagtatcagaagtgtgttctctccgcaacgagaaatgatagatttaatttcgtggttgctaaggttttgacattcatcaacaatcagcacagaacctttgcccggatccggatgtccgatactgcgaccacggaagtaatacaggctagggaattgaaccacccctttttcaatcaaaccttcaatgtatttttcagattccggattatccttaaacagaatattcaggctagtaatacaaggttcaatagaaggccggagtttttcgcccaatgtaccaggaaggaagccgatttcacttgataacgggctatctgacttcacatacatcaagttagcgtaatgtccactattaaccaggtgcatagcaccggaaacagcaagcattgttttaccagaaccagcgccgcccataatggtagcaacatcgatttcattgctcataattgattcaacgaaagccgcttgcagagaatcacggggttggatagctttcatgagtttgcgtttcatagcctgttcatgcttaacaggtaagacattcaagcaaatctcatcagcagtcaccacacgcccgactaactcaccgtttgaggtaatgtactggttaggataaaaatcttcgtcaggaagcgaactgtaagtgatttgggctacattatccgtatatcccaacacttctacggtatcccagaaatcagggatctctacataaccggaatacaatacatcgctatcttttaacgtatcgtcgccagtatactgttctaccttacacccacgggacattgcgatcagcaacatcataatatcgcgagtaactaaggttgcatcctgttgcatacaagtttcaatgattcgttcgtcttgcttgtcaagagcaaacgttttgtttccgacataatcaaccactttaagggtgatagtgtcagacagtgctgggtttgtcaggtttaaaggaatacctgatttcgtaatcgcatcatatgactgaccgaaaataacttttgacagaagccggatcgccaatcgtgcttcgtgcgctgttcgttctttcgttttcaggtgatctaattcacccatagtagcagaggtaataatgatttctgtaccaggttgagtgaatgaatagattgaataggggttactaatcaaaacattggtgtctaatacgtattttgacatacattaaccttatgtggtttcgttaaaaaatgcaccgaaaacctcttttgctttccggttataaacggattttgcttcttctggagtgttatagtaccccaaaaattttctttttccatctatgtttatctgcgctttgtacttcccattggctttatgataagaaacacctttcaaccctgtactactgtttgagttacatttctttttcatcgcattttgctggttcgtcgctttctgtaaatttcttgctgtatctccattctcaacaccatatacatgatctacgataggaggaagataaccattctcaacgtaaaacactattcggtgtcgcaaatacatagaacctttaaaatgaatttgggaatactcgtttttgcttccggcttcacttccaggagacatagggccgcgctgaactttctaatacactttacctgtagatgtatcaacatctacaaaattcagaagagattcgatcccttgaatctcttcatgtatggttcttgatgaatagccatgacttttcattacatacccagcgaaattacgtgaatatatgctaatggatgtttcttttgtacacaatgcatgagtgtattatacacaatgtccatgcgttcattgtgtgtgagatcgcactcatcaaaaataaggtttattgcctggtgctctattcgacgtccacggaaatgattaagaattgcccctttactggtcaatacatcacatccggtagcaccatttagccgtttggcttcttctgctgcatttaacttatgcgctacgtaaatgttaagggaactatgggaacgtttcataaaatcaaacgcgcctttagtcttttgtgttcgtctacccagatccagcctggtttcgaataccataaaatcgttagggccgtaattatgcgttggttcttccaactctcgcataagatgcatcttacgacattcttcaattgtctttacataaaattcactattcatgttttacctttaaggggccaaagcccctttgttacgctaattccacatgcggggcatcaatgaattttgtttcgatcggaaggttcggatcatttttccagttgataccaaaacgcagtttaacacccagttcatcacctgcttgtttaacagcattcaggacaggcaaccacactttagggtttgtttgccagccttgaggcaacacgctaggatacagatccaccgcatcacccgtgatgtgttttgagttcattgtttgagatacacccttacggacgttctcgcgctgttgttctacagtacgcagaccttcacgtacaccaaaatcaacaggagacagttgcagagcacgttctacgactttcaccagttgaggtttaacgcctttaaggttgttaaggcttttttgactgaatttaaacataaaatcacctcttgtaaaaataccctgtttgggtacacagggtatttatggtttaagaggttcgataattaataatcgtaaagatcaccgaagcattcttcaaattcacgtttacgttcaatttgctcgtttctacgctctttcatatcaggaggaagacggttttcattgacttcatcaatgtaagcctgtgcatcctcttttgttagaaagaatgcatggaaattgtatccgttgtacccgttcatactacgatcttcaagagagaattctgtgtgacagtcccagtctttgtacagggtaatacatttagcaaacagcccaataccgcgatgaatgtatgggaatccagtaacaatcatcttgctacccatttccgcattttctccgttcacacagaatacttcatacatgatcgcacctggtttaacatctttcttaacagcacgtttttcaaaagcacttttcataatatattcctctcaattggtgtaactacagactactagtttattttctgaatgtcaacaaggtttatcgttttttgacggaaaagttagagtgaacaaacgatcatgaaggttgtcgatccgttcacaagcctgtttcagtatggttttatcaccatcatttgttgtttcaatgcatccaagttcatcggcgtcaatgttcactacgtcgctcatcaatgaagcaaacacgttagcatcaggatgtaacagttcttcgatttcggccttcatgccgtcgtgttcagaaaggatatcaataatatcacgggttaaatctccctggtacgggaaccctgtttctaaatgattgatgatcctttgtgctttcgtaatcataattttacctacaaaaaagcccctttcggggctagttaattaaagttcacagcaacggcacacaccgtattttgtaaatggagcatcaccgctaacgtaggcccagaaatcacatgcttcttcggcagtatcgaagattgcggcatcatagaacccgtgggcttcgttaccgttctcatcgatgaaaaccggagtccagatattaggattgaagcaatcgtcaacaacaacccaaccttctttagctttcattgcttctttgttggcttcgatgtgagctaagatttcgttcatgatgtccatttttctctcctaaagtgtgtttcgtttcgacagggctatagtctcataaccccgtatctacgtcaacacttatttgaagcgaattgtgctatttttgaaaaatagtccagagcacacagcaccttcaattttcacccctgtagggcttttagcaacgaaccctgttgcgtaggtgtctttctcatcacatgcgaaccaggcgtggcctgtgtacgtgatatcgctaaacccgttagcagtcagaatacgttcggcttctttctcatcggtgcatccggattgtgctaaaacgacaataacgacaataacgactaacaccaaagcaataatatatttcatgttaaactctttttaagttggttttactggcttcaatccagtacacgggatcagaatagttaccgcacatacccagtaacacagttgtacatcctaaatgatcggaaggtctcaatccatcaggatgaaaaggcaattcgttaacaccgatactggtagcaaaaagagcacctccagtactgtaaaatgttttgatatgatcgtatgcatcatcaggccactgaaaacgataagttttattgtcaatggttactgtatacatatcatattccgtaaacaacggatcttttccttgtgttgcaccatacagagcaccgcgccattcaaccagatttgcttcaatgtcgcttacacaaatttcgttacccatacgcaaatcatgaaggatctcttcaatggtacgaatagccccgctaagttcattagttaacatagagtttcctttaaattggtttaatggttttcaggtgtagtttagcataagaagaaccaaatgagttgccattatgatcaaacttatgttcttcactcttccagtatttccctgatttcatcaagggtatacgcttcttacctgctgttatcgtttcaaccattccggtatgagtgaatatcatgatataccctcttctttcagcacttcccagatcaggcgatccaggtgcatcagattccacataacggagtcatacgaacccagcgagcgggagtaaatcactccccatgaacgataagccttttggaatgattcagcactattttcatcgtgcggcatatcgtcaccagaagcgatcaacagtttcagaaccatcaggctattgagcgcctttggcgtgaattcttgttcgcttaacttcatcgcgtagcgttcgatgatcgcgattgacttcggatctttaatacgcccatctgtacggcgcgttttaaacgcgctcattaattcatcgactacggcggtacacttcatatgcttcatccttttcctgtacagacatccgattatagcggatctcttcgcgctgttcaacttctctcactgcttcggctttcttttcagcggtgagtatgtgatgtactacagcgtttcggatttcccagagatattcaatcatctgcatatcttcaacggtgtggtagcctttcatatcacattcaaatacaatttcatcgcgttctgccattgccacctgtgcggtagaaggacaaataaccattccagagtatttttcaatcaacgattccagtgtacgcggttttgctggaatgtcaatagataccggaaccattcgcatcgttgaatcattatgggattggtaaatcatcagaatgtgatctccgcaaactgcattctacgctcaatcgcatggatagcgttatcacgctgttctttgttttcatatccagcccaggtaatcggggttgaacagatcaggtgaaaagtgattgctgggtgtctcttcccttcaacaacgattgttgcatcatcttcgatccaggttacgtgatccagattcaccggatagtttcttacggtagctgtttcgccaaccaaaggcgacacgtccagaatatcacgatcgcggacatatgatttaatacgagatacgattaacattatttcaactccactgcatatacatcggtttcaggggctttgtgtacgcgcatatctttaccacataccgcataagccggacagttacggcaaccgttatgatccttgttgcccgtcagttctttacggaactgttttgttttcgggtgttcccagatatccttcacaaaatcttcggcttccagaacatccagaccttcttcccagccaccttcaacccagcgttcggtaaacgagcaagggaagaactgaccacgttcgttgatgtaagagctaaacatcgtcgcttcacagtcttcggcgtattgcttgtactgttcgaagttcgggtgtccctccatcgcttcaacgaaagcgggggctgaacagctatcgaatccaaatcctacaccagaatcgaggcaatattcaacaagttttttatactgttcgcgggtaacggtgtcccagttcttaccgcgtcccttttgtttcagacccaggaatacgatcgcgttaacttgtttcaagcgcggatcattctttacagcatcaaccacgttaaacgcgtcatcataggttttagagctaaccatgaaatgaaggttgatttgctgttgtccggcttctgcaagattagccactgaattaaacgctacatcgaatccagcatgtttgtatactgataccgcaacagccccagcaacagccgctaaacgcgctgcaacgtcttttgatacatcagcaatggtaaggtttggtacaatgcctttagaacgcgcataggccatcatatcaaacatatcagggtttgtttgtccctgtgcatcagcaccgagggcgcattgtgttaaccagggcattttatcaatgatagatttgaatgtatcaagatccatattgaaaccgttagggttattagacttgtagcagaaaccgcaaagtttaccagcagggccattgcatttagttgtgatctcgatatcgagaatttcggggaatggtgcgtattctggatcgtgggaatatgttgcaccccagcgagcgaattcacctgtatcaacgttgaaattatagttgtagaacttcgagcgagcgaagcgcatattaccgtgttgatatatgaacagggacggcgctttgatgctggtaacgatatcgacagatttcataatataattctcaaaatttaacgtgggattggaagacagcgcgagcaaggctttcattgtcgaacggtatcgactggtgttgcgctttgctgtcaatgttaacgcgccagaactcactagaaccgtttttcgtggagtaatgcatcagcgttaccgttttattcttttccaggaaggtgcgtttgtcaatctctgttttgatttcgtgttgcatcattttacactccgtttcagtttacgttcgtcagccagttcttttttgtacagtttaatgtacttcccgttaagggtgcgaagctgttggaaaaccttgttgcacaaagcacgtttcgctttgtattccggcgtattacggattgattcgaccgtcatacccatttcgtttttagggtacgcgctcaactccctgccgatctctctgtgccagttgcttaactgatcacgctgtgctttgtactcttcaaaagttaacataacaatctccggtttcgtttctatgtgtgtaaggtatcattaccctacacacaacgcaagcgattttattttccgtaaagaacacaatattctttatatttttcacgggctttttcttcattactaaaggaaactcccgttccaaaatcagaaccttcgaacgtaacatcccacgattcatacccatcttccgaataataggaaagtgttattttacgatcttcaagaacaagttgttcaacaacaatatcaatttcagtagtcatagttcatttccataatcttttgctgcatcttcgggggttgcattcagtctgtaaagctcaacagctaacggactgggttttatttcgcggttcaggatctcactgataccgcgaaggaattctatataaggacggaatctcatttgatacgtaccgcgttaaaagcctggttgcgcagttcataagcctgttcaagctgttcagtagtgaacagaggactatcagtgttagtggtgaaactgcaaatggttttgttgtcggcgttgacttcttcgacaacgatttcataaccccagatcccgctatactcacatttcacgttccggtacttgatgtaaaccgcagcaacatcttcttttttgtagttccggcttttgtagatgatttccatgatttcctccttcgtttcgatgtgtgtacaataacagatcagggttatcgagttttagcaatttgtgctaattatgccattttcttagcgattttccaggaggctttgaacgccggaacgtcttcaatatcaatccagaaaccagatccgaaaccatcactatagcaagggcaaccgtcgcagtagttttcccaggtcatcacttcaccaccaacagaagcaccagtttccatagcacgtaatgcatcttcaactttttccaggttttcggcgttgtcgtcgtaaatgacaaagtaccatttaccgttgtattcgttacccagtttgattgattcgcgaacaagtttcatgatgatttcctttttgtctgtttcgtttctatgtgtgtaatataacaaaaaccctcaccataggcaaggggtttttttgcaaaaattatcgtttgattggggtattatctataacccgttgaatttccgaacgtatcgtagaatactgacacaattcggtaagcgcccgatcccatctacctgactatatttctggaatatgtaaggatctgcacctcgatagccagttgcttgatgcttacactctcgtttgaaccatgacattaataatatccttgtacgttgaagcgatcacataacaattttcttgtttggttagtatcgctttggatagaatgcaacatagcgctgatcatgtttaggttattttgcatcatttccgcgctcatgagaacttccatacgcgcacgtaagcgtttattttcttcttccaactcaaccatacggtcatatgctttgatgcgctctaagggcatatcaggacgctctttgagtacgcgagcacgttcaacctcacaagcatgatttgctttccagtggttcgattccgcttcaaatttattaaggcggcggatctcttcaaccagctttttgatcatgtgtggatccatcatgtcgatgaatttcatcaagcaattggattttgtttggttgtcagcaacagaccaagacgaattatacgtaaccgtaaacgtgcggcccatttcatcaacaaccccgatcttgttatcatcggtgattgtagccgcccatttatcccgcatggctgtacaggttccactggcgacactatgcaacttgtttaatgttgcgtcatcaaacacaatttcatcactcatgtatgcctcacatagatttcaaaatacgcagaagtgcgttagtaaagatatcaggaacacaaccaccaaacaacttatgattcatcagcgctaatttcatgctgtgattttcagtatatcgcccgttatggatcccccaggcaacgacattaccaggttcatgaataactaagttagtgagagtaacggtcatgcgctctttatcattgatagagaatgaatagcagtaaccggatccgatgtcgccgtaaaggttaaggtctttcaatttcccttgctcatgcaagcgtttcatatgaactgcacatgcatgattaatagtcatttcgtcatccctagcccagtcatcaataccagaggtataacgaatattgaaatagttagtcagttcatttgatacgctcattagaaacctcacttttataaaattctttaccagacccattacagctactgcatttgggggaacggttgctatcataccgccccgatccgttacatgcaacacatttccttaatttccagccatacacgaaccgcatataataatcagttcgtgcggccttgcgttcgtggaaattcatgctttgtaaacctgaaccaaccacatttcgatgttaggcgcgtaagtaacgtttaccttatgcatagtgcggtatttgtaagcggctttgtatgcatcgagttcagtcggaacacagaaagagaaaccgttgtcatagcgttctgcgttagaaacttcacaaccaactacagcggcaatatttttgttcatgttcatggtgttttcctttctctgtttcgtttcgatgtgtgtaatataacaaagcccctgcacgaatgcaagggctttttgattattttggtagtttttcgatggttgcttttaactcattgattttattaaagagttcatcgctatatttcatcaactcactacggcgcttttcggcccacttgaccaggaattcaggagaatctacaccatacgtgtaaccttctgcactcagttgaatacgagcacgggaaccataatcaacagaactttgttcaatgagaaacttaaccgcatcaagcagggctaaatcttcatgacttaccaatattccttctgcctttggaagatccacaacttcatcctggatgagttcacggcgggttgtttcttccagtgtttcatgattctggatcatcgtttcgaccggatcctttgccacgactggtttgttttcacctacttcttccaaaaacatcaacatccatccaggaattttagtccggaaagaactttgcacttcactggtgcatgaatttcccagaatgtggatcgcgttgccatgcatatcaactttattgatatagataacgttctgctgttcctgtcggttgctaccataagaaaggaagcggcgtaacgatgtgttatgaccgtacttccctaaatcaattcagccaggcaatcaatgatcccacggttagaaaccttgtagcgcttaccctgtttgaaaaataacggttcttccaggtgagtaggggtaaactcttcataaagaacatagaattctttaggaattttgcgctgaaccagactcagtttacaattattagaaggaacgataacagagtgaatgtttccttctgtatcacacatagcttgcattacttgcggatagtaaagatggttcttgcaagtatagctatggatacgactctgacgttttttgaagtaccatttaccagtttcaaaaggcgctgttgtaaaattcattttgcattctcatacatagttaaaattgcttgcatatgttccggtgattgtggaacccctgcaaagttcactttcaaaaagaaattcaaccgatcttttatgttgcactcatcgagtccaagcgctggcaatgaaatgttttcaaaagcacgttgttcatgtctttccatttcaccccaaaacaaacgggaaccgttaggcatcggtattccaatttcattgttccagaatttcatgatagttgtcaagcgttgttttccatcaatgacttctacccatcgagattcgttgaattcactatcaaccgcgatcgcaatgataccgcaaggaaacccagtaatcaaagtcttcatgaaagcatcttgctctttctgcttccacacgtagggccgttgataggacggattcagatccagatcgttgttcttgaaccagtgaatgtaactaccaaccatgatcgcatgatcgcgactttggaaagtttttaactcacgaatacggtttcttacaatttcgtctgtcattataaaatcaccatccagtatataatcgtaatcataaccgctacagtgaaacacattgcagcatacacacgcgcattatgaacctgtgttttcaattctgcgatctcttgatccttttcgctttcaaactcttcgcgagtaccataatacccaggatcgttagccgttgccaatctaaccgcatctttttcaaccagcgttgcgtaaccgctttttatttgtgtcgccccgtaccatccaccccgatcgttgttaatgatcagatgatcacctttttcgttatgctttgattcgccaacaacaataaccagcttaccattcataatatgatcctcaaaggggccgaagcccctatttcgcgttcttctgtagataatctaacagatttccgctttgatgtaaatccaaaactttagaaaacttctctgcgtttctttcgtttgtaagttcgtcgaaatgccatacaccatcatcagctattaacgcgccaggtgatgaacctgtttctacatcacgggaaagcgcaagccccagagggtgtaagatttcgcggttaatgcgccaaacaaggcccatttcagatagagtattaaaatcgacgtatttcatattatgcctttggtttcacaccgtaggccaacataccgaaacggtgatcattatctgcatctttaaacagaacttcgttaccatcaatgcagatgacctttgcttccggatcgatgtatggaagcaaccacaaagggatcaggcgtaggccgctatgttcatcccaacgactgaaattgagttcttccagttcatcaagggaaagctcattaggatcgatataacggaaccatttggtatttttgaggcggtcggggaagtttacaatttcttcatagccgaattcagcactccatgaagagtaaacagtgacttcggatgctttggttaaaacagcatcgcgaattgatttgcagatatcgattaaagtcagttgattttccatgatatatttctcatcttgctaaaattttaggcagtagttgccccatcgttttacgtgcatgtgacggaatctgtgagatcgggacatatttaaaatcatccatttcacgtatagtccgtccgttcttaacgaaagttgatgcacaatagcattcttccgctactgggtaatcttgccctacatagaggaataaagcaaggttttttgttttcgtgtaatcgagaacacccaggctaaccaattcctccgcgaacacttcaaatcctgtttcttcgaagcattcgcggatcgccgcgtcaatatgagtttcgcccttttcaacatgccccttcggaatatcccaatggggcgtttcggtggcatggcccatcaacacggcaccatctttaacaaagataatacccgctgatagttccatttattcacccgcaaaagcgttatcaaatgcttcaagtgcgttgttagcgcgagcactggcttttgtcacaccagcctggagattttcaaagaaggtatgtttccacacttcgcggcgactggattcatgttccagactgtttttgtgatcaccgcgaatctgttcttccatgtcataacggtacagatcgagttctgcgtttaatttctgttctaatgcctgtgcaaatacatgttcaatattcattttgtatagcctatttcagatttaaggttttcgagggtggagtgataaacaacattcccttcgtgtcgagtataccatacttttccgttctggttacactcattcattactttttcatctaaaccagggatcggcttcatgctgggagaaaacgcgatagacatcatttgttctgcactatcagcaaaccaacaagggaaaacagatccagttggtttatcaagatacatcaactctactttagccatagatttcttcgaaatcctcacaatcaggcaaatacgtttcacagaaggtgcaaagcgtaaagaatgcaggttgacgaataccaggattatccggtagatacatccagaaggtgttagcaaacacgatgaatgttttcaggttttcaacggttacttcgctgataccatcataaccggattgagcaatagcgcgttccaggggaacagggtattgctggcaatagtcggcgtaatgttcactcaataccattgagttagccgcttttacgagatcgataattttcattcgatataaccccaacgaatttgtacgttatcgatcgatgcctggcttgtaggagttggatacggataactttgtgcttcccacagataaacaacagcgtgttttgtcaattcttcgataacttcatcgaaagtcccgacacaggtttgtaaaggcaacgcgaaaggtttatcactggtttcgacttgagcaatcggcccatctaccaggatgacgcgaaccgttgtatgctcaatcatatgagcgtatattttgtttttcatgattttacatattccactttaacaggtttggcgataaggtgatcttttgtgaagccttgtccgtcgcaaacatcacaaacgattttgaaatcttccatttggtcgacccatccagaatcaggcaatccagaagggtacgtgttgaaggttttaacactgtatcctttcccatcacacttagggcatttatatgggtatttcgatttgatcgcactatacaattgacccagtgtggtcgaatgatcaaagtgtataacaaatgcttcaatgtcagcaatacgcagttcgtttggcttgatcacagtaaacacatttgaaggtatgtttgagcgcataatatatttctcacttaaagaattttttgatgaaagagaggaacaggccaccgctaaacatgatccagtatccagcaccgtcgccatgaaacaggacgtaaaccgcaacaccgtagcaaaagagttctgcaatgttcagtaagtttctcataatcccctcccttttctctataccaggtattttaccagaatatagaccatagtcaacaacaaagttttatcaacgatacgatcaccagtcatcagtagtcacccataggttgagaagaagcaacgctcaatacgcggaaagtgcaattgttccattcacaataagtttttgcgcaatgaacacttcctttcataacaaacccgtttgagaaaattaaccagtaaagtttcatgatagcctcctttgtttcgacaaggccaatataacaaagcccctgcacgaatgcaagggcttttttcagtttttcaacatccaaagttgcggaggacaatctttagaagcgattagacgatccaggcgggacataacccgacgataaccgtcgtattcaaaattaatttttggtggaacgtagttgacctggattgtttttctgttagctaaagaaacatactcagggatcaccgttcgcaaccgtatagcgatcactggcttctcttcgccttcgttaaagaacatttgaacagttataggacaagcaaagattttaccatttacccgacgataaacaataacttcctgtgtcccttctgttttggccttcaccgcgtaggttagaacataacacgaataatgatttgctagactcatcatgatatcgcgataagtttcaatatcttttttaatcgatactgaacggtctttaaagcgatctgcaatgtggtcagcagtagccgctaccttgattgtataccagtcacctaacgcgctagtaaacgcctcgctaacttcttttcgtacactgttaacaagatacattaaacgtgttctgttcatataatcctcactgatttttgaagtattcgatctgacgcaaacgcttttcagcggcggctttcgaatcgtattcaccaagttcttttgtgcgatcgtgattcaaaacaacccacttatcgccacgctgttcaatgtgttctgtaatatcttttaacgacttatccagatccagtgattcagcctcttcacagataatagtcaaatccacgggcagtgtcaacaaccttttcactccgctgatatcatcaagcatcgaatcgtatgcaagggttacgtgcggtttgtaatccggataatcgtatgttgcgccagcatcaatagaatctttgaaacggctatgcaggtattcagattccaggatccctacgatagtgctaccgtattttgtgtcccacttttcaacatcaaccagtttagcaggttctgtgatgtcctgttgcgggaacaaatcaaccgttttccggctgtatacgatcgttgtatgcatcttttcggctgaaacagcattctttgtgatacctaatgtcttttgaacatttttcaaagcctcacatgaagcctgatcgaatttagcacacatgtagataccaggatctacaacaggttttgtgatttcaagaaatgatttcataaaacaccccaataaaaaaggggccgaagcccctttgtaataaatttgtttttacgcttcttcgccaaaggcggcttcatcttccgcgcctttttcgacttcaacggaagggatcagagcggataccgcgccaatcactgcttctggggttactggctggcttgcgtcaatacccagtaccgaacacaggtcggacagaagttgacgatgaaccgacagttcactttctttttgcgcgataacttcgttaagatcgaatgcgcggcctttcagtaccagtacttcattttgcagtttttgaatatcagacattttattacccattgttaaaatttaaaagtatcgagcactttgctctttagttgtttcaaagtaccttcgttagtgatgatactatctccaggttgaggtgtcaaacctttttccgtggaatgttcatcaacaattccggtatcctttacaataaacacaaacttagcacccaagcgtttcaggtatttatattcgtgttcctgacgacagtcagttaccagaagatgattgtattcgtcaccagcatatttattgacgaatctttccagtgtgtaacgaacccaaaccgtgttatcatacttgcatacgatatcagttccaaacacttgcatcaagcgtctgatactccagggagtatcgttactcataatcagattatcaatatcatcaggactataaacaatattgtatccacgttctttgaggatttcaagcccgattttgaaaatatttagaacatcttcattagacatcacaagaggtttctctcgatcaccttcgtaaaaaatagcatccggatcagaatattttccttcaaccagactacgaatgtatggtttagcgtaaccatatcgctgcattgctactcttagcgttcttttgataccaaatgccagtgcttcacactgaacatcattgtacgcctcttgaataaatttagcaaccgtatctttaccagttcgcttttttccactaatcacataaatcattagctcattctcttttgagaagtgactacttttccgtcaatttcaacttccatatgaaggaagccaaaagttgccatacacgtaaccgcttcatcactatcgttagtataacccaattcaacctcacccaagtttgttgggaaggcaccataaaatctaaatgtggcgatcgttttcatctgggagttatccaggatatgcacagcgaatgattgcttaggatcatcccacgcaacagagttaaactcgttgtaatcgtttgtgctcaacatccatatgtaaatcccaagatacgatctcatttcctcatcgactacaaagcggatcatcaaaggatcaaactcaaaagccgaaccaggtactttacctcgaaccatcatatttgcaggaatatcaactgctgggaggttcattgatggtagtgtaaccccttgaacttgtaaagtcaaacctttcatgtaactgttatcaggaatatcaacccgaaagtttgtaggtgagatttggtttaaaatcatttctgtagacataggatctcctttcctctatttagcggggaacgggatcaaagcggcctgacggggtaatataaaaatttgaagaaaatgcttgaccttttaaaatctttgatctataataattattaattaaaattttatcaaaaagatctaacaagatcaagtaaagtttaataaataatttatcaaaaatttttagatctgatcttgaattcataaattttatgatctataatatattaatattttattttatcataaatttttatgaagatcaatacttagatctaataaattttatgctttttctgaaaacttttcctttaccccgtcactaaatactggtactatgttcccatattggaaatcaggaaaaacaaaatgactcacttgaaaaaattcaaagaatttctgaccgaaggtaaaaccctcgctcgtaccgtagcacgtggtcaacgcgctaaaacttccgataaacattcaatcggttttcttcacttcaaacatggttctgatttcgaagttttagcaccggattctcacgatctggcatacttcggtaaaaacattgtacgtttgaaaggtatgactactggtaaagttcaagcggcttatgtcgattgggctaaaggtactgtttctttctacagtggcaatccggatgatgatctggatttcgacaaaccagaaaaattcaaagctgctactctgtatgaagaggcggaagaaaatctggatctgtataaccagttagcagaagatttcgaaatcgagatccctatggatgaagctctggtgaaaggtaaagtttacaaactcccaagcaacgatatgcgtcttctgtacactgggcgttctaaaactaaagcaagcggtgaatatgcagtgtttaccgtagttgatgcttccggcaaacctcgcctagtatctggtaaaaaattcacccaggaatataaaggcgatatggtttctaaactagtcctggctgaatccgaagatctgaatgaagcggctaaaggcattcgcgaaaaagttattgctgtgatggtgaaacgcgggtttaacgaaaaagatgcagaaaagatggttgacaaaaacctgaaagatgctatgaaagttagacctggtgcgacccctggcaaacttgcagaaatagttagcaccctgtaaaaataaagccccttcctttcggttggggctttttgattagtatttgctccagacttttttcgcgccgtaaggtttccctttggacataaattgctgagtcggtagccaaacagctttcgcccaatctttaggggcaatctctgctaatggtgatttgaggtgtgatggtagatatgctttgatcatttctgttgcgcctcgcatacctttcacgttaccccagttaattttaagcactgtcttgttagagaggcgtttagtggatccgtaccctcgcttcaataactcttctaaaaactcctgtcgtgctcttggtggcgcatagtgcaagttcaaaccatagaacactaagttacccgctttcgatcttccggatcctaagaaaatgatcagtggaaatctatcccaatacggcagggtgtctttatattttgcatcatatgcaaacgtgtacaggcgacccgttgctggttttgccacacggtgtgttttgatactggttttgatgaaattaccaaaccattctgttgaatctttctgtcgctttgccgccgatacaccaacagtgatctttttcagactattacggaaatcgttgatgatctcgattccgtgttttttacggtagtcattacgttttttacgggcttctgtctctgcggaacgtcgttcaatctcatcatcaatctgttttttgtaacgatgcattgactttgtgaacgttgcgtagtttaatccctcagaatcggcaaaacgtttagcagaaacacctttcgtttttgccttacggaatttgatccccagttcaacccaatcactcaatttgcgtttgggtggtgctttgggtttatcctcttccgcgatgatctcaaactcaaaaataaaactcatgtttccctccagggattactgacctcgccacccaaaaacttttttgagtgattcttctgttacgattttgaactgccagcctttttgacggcatagctcatttgcggctttccacttatcaatattaactgtataggtgtaaagagcatcaataaatttctttttattgtgtacgttgttgtttactggcttcggtggaggcatggtttctttaaggggcttaacctcccaaagatatgtagtaccattttccatttccacatagaaatccatgtaatagcgtcttctcttaccgtctgcattgcagaaatacgggatcactatacattcagaattccaacgttttacgtgtgggtttttatccagccacttcataacgtagcgctcccacgatgacctatacgtaatctttcgcggatcgcctttatacttctgtatgttttcgggtacaaacgaccctttatacgtctgtcttccagccattgcgtaaatcctaaatagaataatataacgtttagataggggaacttatcgtgctattttcatacttcccgcctgttgattacaaaggcacccagacaactgatattttccgagactatcgattttattttaatcgtgtgattggaaaatataaaacccgtagttaccagataacaggcacactacgacctgaacaacttgcagaatcattatatggaaaccagcaatactactggatcctgttgatgcttaactctgtttatgaccctttctatggttggatctccgatcaggaagccgcgtatcagtgcgctatacagcgttattctgaggttggcggtgaacaggttctgtatcatgtagatgaaaacaacaacaagtattataaccttgtcgaagaccccaataaccctggtcattggtatgacaaaggtgacaaaccaatgctgtatttacagtatcaaggtgtattagctcctgtagatatttatgaagatgcagtgttgcaaaatgaagcaaaacgaacaataaaaatcattagtccgtctgacatccaggcgtttctgaatgattttattaaagaaatggaaaaggctaactcatgaaattaggcggaaatttacactcccctttctttgatggggtggttgaaaacgttgatgatccgcgcgggttgggccgtgttcaagtccgtgtatttggacaacacccagcccaaaaacaaaaatccgatgcaatcggtgttcctgttgaagatttaccctggatgatgcctattcaggatattagaagcgctgcgatctctggtgtgggcttctctccaactggtatcactcgcggatcctttgttgttggttattggcgtgacaaatggcaccaagatggtatgataattggtactgtcgctggtgaatatgtcgaacaaccagacacacagaaaggtttttgcgatcctatgggtgaataccctcgctatgttggtaacgatgttaactcccttgcattaggtggtttgaaaggcaaaggatcatcaagtgtcatcattcgtgattcaaacacaagcatagcagtaaacccagacgatcgcccactggatgagataccagaagataaccgccctgatacgggtggatttacgatcgaaaagatgctcaagcaggatgaggggatccgtacacgatggtatacagacagtgaaggatatccgacaattgggatcgggcatttgcttatccgcgaaaagactcgcgacactgcaaaaattaacgctgcgatcagtaaagcggtaggtcgagaagtaacaaacgggacaatcacggcagaagaggtttcaaccttatttgctcaagatttagccaaagtaagatctgatattcagagaaccgctaacgtccgtgaagtgtatgtgaacctaaaccgtcctcgtcaaatggcgatcgaaaacatgtcgtttcaaatgggcgtcggtggtgttgctaaattcaccaataccctaaaagcgatgaaaaatgaagattggcaagcggcttataatggtcttcgcaattcactgtgggctagtcaaactccaggccgttcttctcgcgtgtctaaaatcgtcctcacgggcaaccttgaatcatatggggtgcaagtaccagatccggaagggcgctctctgagtgctgcttacgctgcgtataacggtgctacattgtcggctactagtccggaagatccgtttactcctggtgatacccgtgtgatgtttgaagaaccagcatcatcttataatgcggaatatccgtataacatggtgtttgaatcgagatccggacacattcaggaattcgatgataccccaggatacgaacgatataaccgtgttcacccagcagggagttacgaagaaattcgcccggatggaacccgcgttgttaaaatcgtaggggatgattatcaaattgtgatgcagggccggaaactcaatgttaaaggcaacttgcaggtagttattgaaggcgacgcattcatttacaacatgggtaacgttcaacaaacggttgatggtaacgtaactgagtttgttcgtggcaacgttcaacaaactgttgaaggtgagtacgttggcctgattaaaggtaacgctgaactaactgtaaacaaagatgcaacagttaacgttgatcagaatcttaccgcaaatgtgaaacagaatgcaaccgtagctgtaacagaagacgcaacgatcactgcaaaaaatgcgaaaatggagattgaagaaacgatggatatcggtgctaaagatatcaatatcaaagcaacgaataacacgtttattgattctggcgcattaacaaaaatcactggcggcaccgtccaagtggggtaattaaatgattatggattatgaatcaataattgatggaattatgcaaaattatcagcatccttgtgatgctgagatccccgctggctattatcggcgggttatctggcaagggcatacagaaaattatccggctgttggggttgagtgggataccgagataatcaaaatcggtactcatctttatactcaagaaccattcggacatagaagcacggatctacctgttgtcaattcaccaggaacagatccaaataccggacaatcaacagggatccttgttccaaagattggctattatttcaacactcaagcagaaattgatgcttacattacatctattggtgcaactaaaatcaatggtggtaatgattggtatggcgcggatctgtcaaaatcaaacctatacaaaaaccctggcgaactggctatgtataaggttgaaaacagtggcgggtatctttccggaacaaaccctgtatgtgatgctcgcatacgtcaggcatataatcaggacactggcgcattcaccaatattgattattattggaatggtaatcgtatagcctatatgaagcatgacgaaacaggggcgcaccagtgcaaatatacgggtatgcaggttaacaccaacgcagatacaagcattcctcctgttcctcctgcaatgccttccacttatggggcattaccgagtgaattaagccgtgctgatatttcgtgcattccggcaactgttggtttcgcatatacaaatatcagtgatgctatgttacaggcatggaacgaaacccgtaatacgttcaagctacagtttaacatgttaacgggtgctgtacagaatggattcgggatcgcgacgatgtttgatggtttatccgtatcgatggaagaagtaatggcgggggcgctcgcattgtcacagcaagcatggcaaactgctatgaaagttttcagacaagtgattagcgctgcatttaacattatcggtggtgcgtggggattgattaatcagttcttgcctcaagtaaccatcttaggtgttgcgatcaacatttacgatctggtgtttggtgataattctgttcagactttgaaagatgcatttaatgcaatcatcaaatccggacaacaaacatatgaaaccgtcataaacgcaatatacggggccataggaagcgcatacaattactctgtggaatatgtcaaagctggcgctcgcgaccttgtggatgcgtgtagcgcgttatttgattggtgtttaacgatgttccaaaacggttgcgttgcattaatcgacttatacggtcggatcatgcaaacatgggctatccctccggaagtcccaaacccgttatggtctgcggtgctggctatccgtaacatcatgatgcaaatcaaaccacttgatataattctgggcggtaacttccctggattcactgcaatggatttgtatcaacaagcacaggaaaaagtcaaggcttttgttgatgagtcatacgaacagatccgagggctttatgaacaagggcaggaactttacaaaacgttaaaaaatcagattttcgaacgtgatgcaattcagagaaaattcaaccagtacttaaactggatgtggggcgctgtaacagacgaagcaacagcggcttatcaatctgcattggatgttgcaaacgctgctgtagctgcaacacaggccgcgtatgacgctatacaggaacagattggatctctacaagatgcaatgaaagatacatacagcatggcgatggaagaattaaagaaattgcctttgatgagtacaataaacgagtttttaggcttctgtggtgtcgcatttgacgatcttctcaagtcatatgaaaatgcgattactggtgctcagtctctgtacaaaaatttcattgatagttctcgctcgtttaaagatcactgcaaagtaatctataaccaaatttgtacgttggcgttgagtaaagtcacacaatatgtgaataaattgctgtctctcataggattagcaatcaactttggttcgattagtgtatgtgttccagtactgaaatactaaatagtcgaatgatcaagaggaatttataataatggctactgctaagactaagactgtcaaaaaacagattaaccaaatccccgatatctttatcgggggtactttcgaagaaattaaaacagatctgattgattggctgggtggacaagaagagtttaaggattacgatttttccggctcgcgaatgaacgtactgatcgaccttctgtcgtatgctactctttatattcagcagatgggtaacacggctctatttgaatcgtttattcgcacggctgcgttgcgtagttctgttgtacagtctgctcaagaactgggatatatgccagattcgcgcacggctgcaagcacagcagtaatgattacggctgctaacccactgaccccaacatcgatccgtatcccgcgcggtacaaaattcatcggtactgtaaagaatacagacagttattcttttgttgtatcggatgacgttgttatcgttcgtgatagtaataacaactatacatcaatgctgaacctggtgcaaggccgtttagttcgtactgaactaatttatgacggttcaagtatcctgatccgagatccaaacattgaccgtagtcaggtacgtttaactgtaaacggcgcacaatgggaagactggacaaacgaaagcattgtaaacgcaacaggcgcaagcacgatttactacatgcgtgaaactgttgatggacataccgaagtttatttcggtgaaggtgaagcaagtcaacaagtggcgggtggtgcattaaccgctgaatatatcgggggcttgaaacctgctaatggatcgactatcgttattgaatacctgtcaaccgatggggaagcggctaacggtgcaaaagattttatctatgtcgatacattaaccaatattagcatcactaacatcgaagaaaacccgactaaatcccctgattatgtcggtgctgatggtggtggtgatccagaagatatcgagcgtattcgcgaacttgcccctgttatgcgtgaaacacaacggcgttgtgtaactgcatcggattatgaatctttcctgtctcacagatttggttctatcatccaggcggtacagtgctttactgataacgaaaaacctggttatgctttcatttctgttaaaccaaagtcaggtttgcgcctaacatcggtacagaaagaagatatgcaaacgtatctttcgaaatataacctcgcgacgatcaccccgtcgattatggatcctaactatctgtatattgtgcaatctgtcaaagtaacgtatgatatcagtaagttgacggaatcagaggaatggttacgcggtcaggttatttcgtcgatcgactcttactatactgacaacgttgaaattttcaacaaatctttcagtgtatctaagatgttgacttatgtcgatcagtctgatacttctattatcggttcggaagcagatattaaattgctccgtgaaattgacaactattacagcgcccctatgtctgggatccatttcttgaaccaggtggaatctaaatcaatcatttccagtacgttcaagttcaccaacgaagaagacgaaagttatgatgttcgttatgcttctacggaaatggatcaggatggtaacgcaaaaattgtaataggcccgttcaaggatggggatatttcgatcgctgcttatacaggtgatgactttgaaaaattaacagatgcaggaacccgtaataaatattacgaagttggatcggtttctcattacaccgatttcattagctttgacctgggcgttctgaacgtatccgccgatagtttcagcgctgcttatatcgagctaactgcaaaacctctcgaagaaaccatttttactcgcgatggttcgttgatcgtgtttgaaaatgacctgcgtcctcaatataccacattgactatgaatcctatcagtcaataatctttaacccctgtcttcggataggggtttttctttttataaatacgtgatatacataaccgcaaatttggagaaatataatgattaaagcgccttcgattacgagtttgcgcgttgataaactggctgctaacttcgtttaccttaaatgggatgatgttggcatggatttctattatgtggttgaattggcccgtagccgtgatatggacggaactattattccagacgaagagttaatctggacgcagttgggttatagctacgaaaacgaatggtttagcgatcaggttgccccaaatacacgttataaattccgtattcaaacaactcatgaagggtttgaaccttctgattgggtgatcagcgatgaattatggacgtttgatgagaacgcctacgcatatacaaccatgcgtgaattcacccctgctgattcgtttatcaatgaaaaattcgccaaaaacaatcgtgattacgtcgattttaacgatgatgttattatggcttctctgatggttgaggattttgtatactctcccctgtattctgatgtaagccagatcagcgataagatcctgaaacaagaaagctaccatgaaattcaagatcacatcgaacacgtttgtaatgatatagatcgcacgttcctggtatactcaaacggattgctttacctgtttgaacgttttcagaatatggctaaagtgtcaaatgacaaaggccaaacgtggtattactacaaagcattaaacgatcgtgtaggcaatccggtttcccgtaccattgcttatcagagcactaacactacgtatgtgttaggatacgatcgcatattttacgggcgcacgtcaacagatattcgttggtcttctgatgaagttcgtttttcttctgatgatgtaacttttgcgaagctggggaaccagtcagggttagattttgatgttgactcatacaacacgtatgcgcgtctaccgggcggagtgtcgaagtatgccgaagctatggcttgttctagtgattggctctatgtggctgctaagaacgttatgcgccgtattgcgttacgtaacacaccaattgatactgatcctggttcgccgacctttggtgaacgtatttttgatgaagtttcatatactatcgtaccaggaaatgataaaattgttgttaaaaaaatggatgtgctgaatgatcgtctgtacgttctggtaactggtgaagttaaaacggcgatgatggatccaactgtcaaagctaacgtgatcccatcaaacgatgctggcgtttatctgtgggatgagaatgcaaagacgtttacccgtgtttatggtaaaaccgaagatgaacgtttttatatcactcatgaatataccaatatgtcaaccaatggcgatgaagtttacatttctgttggtaactacaaatatccaggcactttgccagatccagatctggttgaaaagtatccggaagatgtgcattcagcggtgaaatacgatcttgttcctggttatactgcgagcatttcgattaactttgctacagttcgagcaaatcagaacgatcctactgtttggaactttgggccgcaagagtactacaatgaagcaaactttagctggcatttccgcgataaggttagcacatggatcaccaatgataaccgtcctctggtggtttatccggaaaccctgtatactctggttactgatagcgcgtctcctgcgtcaacgattcgtgtaaaccatgaagtttgggacaaaggaacagttactatctacttgaataatatcaaatttactggttttacgaagtacacaaacggtgttctgttgtatcgctcaggtggtaggataattggattctatgaactgtcataccgcgcaagggatgaacttactattttctggaaacctgataacactttaatggtggcaagtctggttaatcaggaacgtgaaaacccatacacgccggatattgaacctggactaatagatcctgatctgagtcacatgattactcgttttgctccgcaaagctatctggacaaccaacagttcgaaaaatttggtgaatactatctgcaatatatttcgttgggtagcaacagttactataacaaattgctgaacctcatccggaacaaatatccgagagagaaaaacaacgttgaatatttgtggtctgaaattaaccgccgtaacatttacctggataaaaccaaacgtgaggcagtggttagattttttgaatcacgtgcaagcgatttctattcaacaaaagggattgaggcaagttatacgttcctgtttaaattactgtataacgaagatgtttccgttgagatcgaaagctccaacagtctcgaatatgatattttggttagttcaacaaatatcagtcaggatatcgtaggccggacgatctatacaccaactggacgcgctaacgttacatacatcgaacgtgaatatgaaaatggtcaattgcgttggtcaatgactctgcataatgctcaaggtaactttatcgaagggcaggttgtcaagtcagaaaaaaccaatttcaccggaatggtaattcgtggtgttcgtggtaaacaaatggctaacaactcgatcgactatataaaccgtggacgttcttactacgtgatgaaaattcgttcaaatctaccgacttcccgttataaggatgacgtattgaggtttgttcatccggtaggattcggctttatgggtatcacgatgttaacagtattcatcaactctggtttgtcaatgactcataacgagacaatcattgatattctgagaaactaccgtttcgatagtggttatcctaagttctggcctgatcgcattgcgagcatggacggtaacggaaaccaacaattcgacctggttactggtgaacctctgtacaccgcacacccgcgagcgggggaaccttttgatgtacctccggaatatgacgttgaagaaaaaccgcttaacggtgttcttccttctgcgcgacggttcgatcaaagtccgttgttcgattgctcaggcgttaaatattcacagttccgtaatttggtggatagacgactgaaagatgatgcaggaaacccacgtgatccaaatcctccatcacagattaaggtaggaaattaaatggcacaacaaaacttgtatcggtcggtaattactgcaaaattccgaaccgaaaacttgatgaacttcaaagatatgatcggcgatgccgccgatctaaacacgatttatatgtctattgggcgaactgaatcatgggcggataacgaatccgaccctaactttgccccgccatatccaaatgatagcaccgatggtgttagtgatatgtggacgcatatgatcggggctactaaagttcctggtgatatgatagatgcaattttaccacgtaaagactggggtgatactcgctatccaaacccgaaaatcttttactttaacgatattgttgttgtaaacaccgcgccttataaccgtactgatccgggtaaaggttggatggtttatcgtgtagttgatgttcctgatatcggttcttgctccatttcgagcattaccggaaaacttgaatgtatcaggatcggcggtatctggagtccgtctcatgaatcgagtgaacctccacgcggagaagctaacgggatcgacatgggcgacggctataaatgggaatacctctacacaatcccgccagatgtcgtgatcaaccgctgtacgaacgaacatatcgtagttcctttccctggcgaactggaagaggatccggtacgttggggttatgataacgtgattcaatggtatccaggacaatacgatctagtgtatcggttaaaggtgaattcaatgcgttttcgtgcgtacatggattctcttttcttcccgcaatctacgctccctggtaacaaagggttccgtcagataagtattattgtaaacccgttgattaaaaaggcaagcccgaccgaacctgaaaagaaagcaactggtgattactataatgctaacgcgcttgaacctgattccggacgtatgatttacatggaaaacagacaacctattattcgctcccttgatcagactgaggaagtgagtattgtattcgaattctaaggaaaaacaatggcttaccaaacagcaaaaaaactaattgatgtcggtgaaatcggcaacccatcaacaggcgatccgctttatgatggtggtgttaaactgaacgaaatgatcaccaacgtttataatgcgtttggtgatgtgcgtatgctgtctgcaaacgaaggtgtcggtaacatggtgatccatgctaccggatactatcagaaattaccacgcacttactattcaagtacaccgatcgaactgggttccctgcatgacatggatacttcaacaggttcgattaccgttgttcttccttctggtaaggttggtgaaggttgctacttcataaatagtacgggtagtgtctctgttgatcgtcctatcgcgtttcgtcctcaagttggcgatacaatcgcgggggttgcagaccagttgtacatcacgtcaccttacacctttgtaaaaatctggtgtaccaaaaaagaaggtgcgatcacaacatgggattattctgtagaatctatgttcggttctaaaacgatgcctgttgacactacggcgcttgtactgaaagcaaacccgactgctattcctatgttcggatatatagaatttagcggggctaaggtgctcgtatacgcagaaaacgtagctggtacagttaccaaaatggcagaagttttaatgaccgtggatcgtgtaaacaaaacgatttattcaacggaatacgctattttgaaaaacagtgaagatgaaatgtttacattaaactttactgtcggtgctggtgatgtcgtatacgctaacgtgcaagcgatcaaagaagatcgaattaaattcacgattaaagcaatcgatacgattaaatcagggatcgcgtcatgaaacaagaaattttaataggtcaggttgtagacgatggtacaggcgattacctgcgtcgaggtggtcaaaagactaacaacaactttacagaattgtataacatgctgggggatggtgagatcccccatccagcaggtgcctggaaaacctttgcgggtacgacgctatcaccaaaatttggtgaatcatgggcgttgaataccagtgcaaacaaaatcaccgtaaacctcccgaaaggtggcgtaggcgactataacaaagttattcgtctgcgtgatgtgtggtcgcgttgggctaccaacaacgttagactgatccccgcaactggtgatactatcaaaggttccccaactcctaaagatctgtttaaagattttatggatgtggaactggtgtattgttctccgggccgttgggaatacgtcgaaaacaaacagattgacaaaatcacaacttcggatctggcaacagtagcaaaagaaacgtatattgctactcagggacaaactgacttccctaacgtattcggtgttggtaatgaatacaacctgcaatcgttcgaagtttactatcgcggtaacttgcttttcatcgatgagaaagacggattcaatgctgataactcagactatggatcgattggttctgctcctggtgaactggttgcacttgatggtaattcagtacgtcttaaaaacccgtgtaacgctggtgacacgcttcaatttgttacctatctagatgggttagcaacatggcgttcgagctatgaagcgtatgtgatgcgcatgtatcagactggtgatacttctctggaaaccgttcctggtgaacagtgggtaggtgatctggcaaccaaaaaagagtttacacctgctgaatttggtgttaaccctcgcgtgttgattaaccctaactcgtttgaactgcttctcaacggtaaacaactggttaaaggcggtgacgctgactatccggcgttttcctgtgaaggtgcggaaggtgttgatgaaagtacgtgtgttggtaactctggtgtatgggttccgtcaggacaggattatagtttagtattcactgattctgtagtgacttcaatcaagtttgctcagaaactggaatccggcgacgttgtaacgatccgttggtttaacaatgatattggtactctgatggattgggaaggaactggcggtattaaagaaaaagctgataaggtttatctcaataacgaagaagaagttatattgacgaaccgtatcgaatataccgattataataacccttctcagaaaacaatgcgtaatacaggggaaacctatcagggacgtattctggatattcaggctatgtttgatattatccacccgatcggaaccatctatgaaaacgcgcacaacccggcaaaccctgctgattatatgggatttggtggttggaaacgttacgcagaaggttatttcctggctggctggacatcaaatgcagcggatcctgatttcgcattaaacaataatgatttagatagtggtggtcaaccgagtcatacggcaggtggtacaggcggtgatcgtggtacagaaatcaaaatcatcaacgttcctgaacttgtatcaaaagataaagttctgattgctgatgaaaatggtgctgtgatcattggtggttgtcagttagatcctgatgcttctggccctggatacactaaataccgtgaggatacattgaaagtgaatcatggtaacacattacctgataaaatcaaaactattccaccgtatatgactgcacatcgctggataagggttgcataatggcttacaacaatatttcaaaaacaagggagggcgctcgcgtcctctctaaagaagcagattacttacagtatgatacttatggtaagttgcctctgatcggcggtaaacgttcgatcggcgaaccaaacattgaccaaacaaaacgcggtgttctgtatggaaacgtacaatccgcaattgatgacctgtatacgcttatcgagcaaatcccgattaacggcgttgttaccatgactgaggatgcccctccaatcgctgtacagcaggttgagagcgtttcttttgatggtattgtacagaacatcgattcagaccaagaacaggctgtagttcacgtgtacggctttcctttcatctttgataatgggactaacgccgcaactgtttgtgaaacggcatacaacaaatttactgaattcgttgcagcggaaaaatatttcgcagaagttaaccgtaaaggtgttgatggtacgatcctagaatgtcgatttattgatagtgttccgcacccggcaacaaatatctcagaaaacggtattcgtcaaatcggaactatcgacgtagccgcaaaaaatggctatggttcatgggttaagttgggttctggtttcttacctgatgttactccgcaagtaaccgtgtattacttcaaacgaattgcataaggataacacatgagtaacaatacaatcaaccacgtaagtgataaatccatttacgtgacatttgacccaacaggtactgattggcctgataccataaccaacgtacaagatgcgttggaaaaaataggtagttgggcgcgtactgatactgggcttcctatcgcaacaacttctgttcgtggtattgctcagatcgcaaccgaagctgatattaacgctggcacggataacactaagattgttactccgaaactgttagcatatcgtatgcagaaccctaaagcatcacaaaccgtatggggttatacgaagtattcgactgatgcggaatctacaaccgtaactaacgatgcatcgtctattactccgcgatcgctgaactatgtgttcaataaccgcaaaggtacagaatcggtttggggttcttctaaaatcgctaccactgcacaggcggttgctggtacagataacactgtaactatgactccgcttaaagtcaagcaagcgatcgcgtctctggttccggttcagtcaagtgcgaccgaaagctcgcaaggtctggtacaactggcaacagttgcacaggttcaggctggtacgatccgtgaagggtatgcaatttcaccttatacgtttattcgtttaactgcaactgaaagcaacctgggcgttattcgcatcgcatcacaggcagaagcaaacgcaggtactgatgacaccaaagcgattactgcgaaaaaattaatcaatacccgtgcaactggttcccagttcggtgttgtcaaattagcaacaactgttggttatgtggcaaacaccgcactttcttctaatgcttatgtattgcctagcgatcgtagtgcggtaattaatggttctctttatgagaatagcgcaatacataacaacaaatatcagacgtggacagatcttgattggcatttcccagtaggtgctattgtcatgactggtttccagactgaccacggtagtttgtatatttgtgatggacgttcactgaataaaaataattacccgttactgtttgagcgtataggttatacatttggtggtggcggtgattggtttaacattccagactgtcgaggcgttgcagtacgtggtcatgaccgtgggcgtggactaaaccctaatcgtgggtatggtacatatgaaggagatatgttgggatggcacgaacacccattacaacttatctaccagaacggcggcaacattccgaaatggcaagcagtttacgaactggaaagcgccgagaagaatgaccaaagcgctcgcgtatttgatgcttctataactaaagctactggtgtgggcggtgaagaaacccgcatgaaaaacatcgcattaaactacgtaattcgtactcaatagaggttattaaatgatcatcgacaaattaaatccgttgccgaagatcccgtttgttgatggcgtcccagatgacgccacgactcaaacgaagattctttggatcaaaaacggtgaaactctggacggttcgccagataaagtgtcaaacactggtagtcttaaccgaactggtgtaaacatccagcagaacgcggttcagttagaacaaaataccatcacccataatgataaaatcaacgaagtaatcgatcaggttaacttgattactgaaaacattgatgctattggtgatgaaagcgtaatcaaaaaagttaaccaattggatcaggatgttcaggcattaactttatcgaacacccaaacacagaacaaggtagcacagttaaccctttctgtaaatgctcagaacgatgaaattggtgaatacgatccagaaaaggatcctaaacaccgcacaattcgtaatgatatcatttacattaagaaagaagttggttcatatcctggatttaacgttgatggtgatgttgacccctcttctactggtactggccttaaataccgcgtactgagtaaccaacgtgccatttctatgcaggaaacccgcataaccaaactggaagatgactgggcgctttccgaagtaggacaactgacagaagaggtaaaagaacttcgtgctgaaatgggtgattctggtcttgccacaacccgttcaatctatgcgcgaattaagatccttgaggatggttctgttgtaatgcaaaatgaacttgatgcgattaatagttatatcggtcgcacgtcaggttcaaccagttccattaacgatcgtgtgaacagtatggaaaactccgttagttctctggctacacaaatcaacgatccggtaactggtatcactgcacaaattacaaccatcaatggtcaaattggtacggtttctgttcagggtagtatccgttatgatattgcggaaaacaaacgcagattgatggatatggaaatgattctgggtgaatccggtgatgaaggattgcaggggcaagttgcgatcttaactggtgacattggcgaagattcagatcctaccagtatcaaaggccgtttgagtgttgttgaaggtgaattacgcaccaacactagcgcactctgggaactgcaaggcgttgtaggtaactcttctagtggcctcgttgcaactagccagcaggttaacaaagaaatctatggcgatggtgttagttccgatcctgttactcgcgctggtttgaaaacgacgacccgcaacctgttcactcaggtaggcgataacgcagaaggtaacgaaacaggcatttatgcactgattgccgaccttaataaacgtgttgaggatttagaagcgttgaacattgcacaggcacttgcagatcgcgtaactatcgaagatctgaatgctaaactggctctgtacatcaaagaagctgacgcagatctccgttatgagagcaaaaacccgcctctgtcattcggtactaacctaactggtgatactgaatacactactggcgatccattgtctctaagcgtaactatgaatggtggtgtttctccgctgtcttaccagtggacgaaaaacggtgtaaatgttggtactgatgctaacacatttaccatcgattcgctacagccttctgattccggaacttacaaagtaacggtaactgatgcaagccataaagtcatcgtttctgatgaactggcgatcactgtcgcttaacgattaacaaggggcttcggccccttttgaggatctttatgattacgaacaacccagcacaattaaaagatgaaattctgcgccgtttaggtgctccgatcgtcaaaatcgaagtgacaaccgatcaggtttatgactgcattcaacgagcattagacctatatgcagaatatcattacaatggatctaacaaagggtatatcattcttaccctggggccggacaacccgaaaaatattttcgatctgagtaaagaacacattttcgcaattactaaagtgttgcgtactaacatgggttcccttgtatcgatggatggtactgcggtttatccgtggtttactgatttcctgatgggccttactggtggttctctgggcgggggtggttgtgcatcacgtacctacggaatgaacgcatacggcgcggatatgggctattttacccagatgatgagctatcagcggtcaatgcaagatctcctgtctccgcttccggattactggtataacgacgacacaggacagtttgcagtatacggaaccgttaaagatggtgatattgttgttatcgaagcaatgatcagatcctttgttgatgtacccagtatggtcggtaacgtcgctggatacgctacagcgggttctgatggtgaagataagccaactatagcagatatatacaataacccctacaaagccgtctcaggcggcgtgaaggctggtcaaggtacaggcgttcagagttcatcctctgcgtataacaaccgttgggtgaaagattacgcaactgctcttgttaaagaggtaaacggtcaggtgctggctaagtttcagggtatgcaattgcctggtggtgttgctccggatggaaccagactgattcaggaagctatgcaagaaaaagaaaacctccgtcaagaacttctgttactgtctgatgcacttccagtgttgatgatgtaagggggaaaaatgcaaaattgggatgaaagtctgtttgcacagttagaagatggttccggcgtcgatcggaacctaagacaagaagtaacaaacccgtatgttaactggtacaagtataaccctactcaacagttacatgattcactaacagccgaagcaattcaaatgaaatctccggatatgtattacgtccgtcgagaatttgttaatattgataaaattttgggtgaagaccgtgaatcgaagtttacaaaatcgtggaaaattgcagcatacatcgattcgtatgcaaactacgaaggacagagagacttttacagcaaattcggtatgatgtcaaacgatgaaatgacacttgtgatcaatcctcgtttatttgcacatcaaactgatggagggatccctgttctgggggatttgatttatttccctatggataatagcctgtttgaaattacatggattgagtttgatccgttcttccagttcggtgatcgtcctcaacgtaaaatcaacctcgttaaatttatctatactggtgaagaattggatcctaaactgcaacgaaatgaagggattaaccttgctcccgatgctgatctggatctcgaacctattcgaaatcttgatggattagcggataccaatattgaacagtacgaagaagatcaagcctttgaagatgaaggcgatgaattcattgaatcgtttgatgttgttaacgggcgcggatcaccgttcgcacagttcccataaatataaccaggggaaaccctatacatgtaagggtataggagaaatcttatacccgctttaacccatacaggaaaaataaaatgtttggattttggtataatagttcgttgcgaaattatattgtcttgatgggttgtcttttcaatcacgtgcaagttaaacgcattcgcggcgaacaagaaaaatttatcaaggttccgattacctacgcatcaaaagaaaaattcctggcatccatgaacaagctgaactatgcatacagtcaggaaaatgttgctaaaacggaaacaattttaccacgtatgaatctatccctcgttgatttgcagtataacgcaattcgtaaaactgggatcgcggtaaaccaaaaaatgacgcagttacgcgcacctggaaaaacagtaacgcagtttaaccctgctccgtatcgtctcatgttcgaactgggagtgtatacccgttacgaagatgatgtgtttcagatcatagaacagatactgccatacttccagccgcatttcaactgtcgtattacagaattacataaaaacgacattaaaatagaccgagatattaaaatatctctgcaatctgtttcccctgataccacgtttgaaggtgatacaacgacacggcgacacattgaatggtctttaatgtttgaattacagggctacctatatccgcctgttaacgagattaaaggcgagatcagaacagtatacacggatttcttttccaatatgaacccgttggacaaagataattttgaatccgttgatgctcaggtggatccggttgatatgcctatacaggattacacgggagaagaatacattcaaacgtatgctaatgatatcccaattcctagcggtgatcaacctcctaaaccgaggggccaataatggaagaatttagcgtaaaacaactacttgatcttgaaaatctccctggtgctgaaactggggaagaaatggttgtgtatgaaaaacttgaactcgttgatgtcgagtcacacccagcagatcgaaaacctgatttagaggaagactatgcacttgcgcgtaaaaccgcgcattacatgaatcagatgatcatggatatggcacaaattgccttgcataacgctaaaaactctgaatctccgagacacgttgaagtttttacaaccctgatgaatcagttaaacaattctaaccagggattgatgaaaattcataaagaaatgcgagaaattaccgaagaaaaaaccacaactaccccgcttcctgaacaaaaggataaaggggttaatatcgaaaacgcaactgtttttgttggttctcctacagagttgatggctatgaaaggtagttcttacgacgcaaaagatgcgattgccggggaatgtgaggaagtatgaccgaaccagtaatgaatccagaaaaagaatcagatcatcctttgaatatgatgcaccctaaatacctgaaacgaaaaatcgaagacgggatggaatgggtacaaagtaaccatgatgggaaatggtatccaaagacgtttaaagattaccttaaaattaacggtatcgaaaaagtaacgttacaggcaaaggataagaaaaatttcgccacctttaaagacaaagggaataagcgaagccgttacatggggatcccaaaccttaaacgtgcgtatgtccaaactcaatggacaaatgaaatggttacagagtgggttaaatgtcgtgacgatattatctactttgcggaaacatattgcgcaatcacccacattgactatggtactataaaggttaaactgcgtgattaccagcgagatatgctaaaagaaatggtatcaaaccgtttctttattgcaaaacttagccgtcagttaggtaaatctacttgtacggcgatcttctttgcacatttcgtttgctttaacaacgataaagacgttggtattttggcgcataaattgtcgatggctagtgaagttttggatcgtgtgaaacaggctattgaactgctccccgatttcttacaacctggtatcgtagaatggaacaaaggttctatcgaacttgataacggctgctccattggggcatttgcaagttctccagactccgttcgtggtaactcctttgcattggtttatcttgatgaagccgcgtttattcaacagtgggaagatgtctggttagcgttaaaaccaattatttcttctggtaggaaatcaaaaatatttttgacaactactcctaacggaatgaactatttctacgatctgtggaacgcttctctggaaggaaaatccggtttcactacatacgaatccaattggacttcggtcaaagaacgtttatataacgataaaaccgatgaattcgatgatggttattcgtggtctgctaatgatattggggcaggtagtcgagaggcatttgcacaggaacacgaaggcgcatttaacggaagtaacggaactcttatttccggctggaaactttctaaaatgtcatggattgatattgaagaaaccgaaagtaatttttatcagtataaagcaccagaagaggggcataaatatattgcggtacttgatccagccgaagggcgtggtcaggactatcacgcgatgcatattatagatattacatctatgccgtttgaacaggttgctgtataccattcaaacaaaacatcgcaccttattttgcctgatgtcctgttacgttatcttatgatgtacaacgaagcatgggtttatatcgagctaaatagcacaggtcactcagtggctaaatctttgttttctgagttggattacgataacgttatttgtgatagctatagcgatttggggatgaaacagagtaaacgatcgaaagcgattggctgctcaaccctaaaagacttgatagagaaagataaactcatcataaataacaaaaagacaatacttgaatttcgtactttctcagaaaaaggtgtttcgtgggctgcggaagaaggtttccatgacgatctcgttatggcgctggtttgctttgcatggctaacaacacaaatgaaattcgcagaattttgcgagaaagacgatttgcggttggcaaatgaggtattcgcacgtgagcgcgaactgctttatgaagatatgttatgtcctgttatcgtaacgagtggcgacgaaacaatatctgtcggccaacacggtatttcgtttatataaatttagaggaaacttaataatggctttaatctctccaggcattgaaactaaagaaacatcggtacaatctaccgttgttcgaaattcaactggtcgtgctgctattgttggtaaattttcatgggggccagcttaccagatccgtcagatttctaacgaagtcgaactggtaaattattttggctccccagacaatgacaccgctgattatttcatgaacgctgtaaactttttacagttcggtcaggatctgcgtgttgttcgtgtcgtcgataaagaagccgcaaaaaacgcaaccgcgatctataatcagatcaaaaccacgatcaccgctgctggttctaactatgcagtagacgatcaaatcaaagttaaacacaataacgttgttattgaagaagatggcgttgttaccagtgttgatgatcagggtaaaatcctgtctgtgttcattccgagcactaagatcatcgcacacgctaaacaggttggtgtatatccggatctgtctagtggctggactacagaaatcgtttccagttcttctggtgtttctgctacgattgcaatcgacggcgtagaagttgatccgggtattactctgctcaaccttgacaccgcaaaagaaactattcaggcaactgctttccaggaactttgcaccaaataccagctaccgtctgttatcgcaatttatcctggcgaaatgggtagcaccgtaacggttgaaattctgtctaaagctgcatacgattcttcggctgtcattaagtcttatccttctggtaagtctggtaaaaacagcggtcgtagttcgatgaactttggccctcagaatgataaccaatacgcgtttattgttcgtcgtggcggtattatccaagaaacgtttatcgtgtcaaccgctaagggtgataaagatatctacggttcaacgatctacatggatgatttctttgcaaacggtggttctcagtatctgtatggtacgtccctaaactggcctgtcggattctccggcgttctggaactgggcggcggtacttctgcaaactccactgtaggcgctgatgaactcatggctggctgggatatgttcgcagatcgtgaatctctgcatgttcctctgctgattgcgggtgcttgtgctggcgaaactgccgaaatttcgtctactgtacagaaacacgctgtgtctatcggtgaaacccgttcagattgcgttgtattcgtttctccgccgcgttctgctctggttaatatcccactggctcaggccgttgataacctcgtagaatggcgtacaggctacaaaatcggtaatactaccccagttgataacaacatgaacgtaagttcaagttatgcgttcatcgacggtaactataagttccagtatgataaatacaacgatgttaaccgttggatcccgctcgcgggtgatatggctggcctctgtgtttataccgatcaggtatcgcaaccgtggatgtctccggctggctacaaccgtggtcaactgcgtaactgcatcaaactggctatcgaaccgactaacgcgcatcgcgattctatgtaccaggtacagattaacgcggttactggtttctctggtggtgctggatacattctgtacggtgataaaaccgcaacgactgttccaagcccgtttgaccgtatcaacgttcgtcgcttgttcaacatgatcaagaaagacattggcgataacgcaaaatataaactgtttgagaataacgatgatttcactcgttcttccttccgtatggatgcaggacagtatatgtctaacgttcgcgctctgggcggtgtatacgattaccgtgtggtttgtgacactacgaacaacacgccggatgttattgatcgcaatgagtttattgcatcaatctacgtcaaaccagcacgttctatcaactacatcacactgaacttcgtagcaacctcaactggtgcggatttcgatgagttgattggatcaacgtcagtataacatgtaaggggctgaaaagcccctataaatacacatagaggttagaaaatgcttactgatattgtacgcgcctttgaatccggtgatttcgcacgtccgaacctgttcgaagtagagatcccgtacctgggcaaaaactttaaattaaaatgtaaagccgctactatgccagcgtctaccgttgaaaaagttccggtaggttacatgaaccgcaaaattaacgttgctggtgaccgtacctatgatgactggacaatcacggtatataacgacgatgcacacacaacccgtgatgcaatcgtagcatggtcaaacatgctgcatggtatgggtgaagacattacaggggatatccctgcaaactacaaaaaaaccgctacggttaaacagaaaaaccgtaacgacgaagtaaccgccgaacataccatttatggcctgttcccgaccaacgttggtgaggttactttagactgggatagcaacaacgaagtgagcacttttgagtgtactttcgcgctagactggtgggtttaaacgctataaatacaggggtagcaataccccttatcattatttttcggagttgtaaatgaacttttttggattagacaatgtgttagggtttttcaaaaatttcgccaaacaggatgaaatggaatttgaagcccaattaaaagatgatacaggttcgattgcgcctccgaaaaataacgatggggcgcacgaaatcgaaacggacttatcaaaccagcgttattcttctgtgtttcaacagttctattccggacaggatccgcgaattcagaacaaaacacagctaataaatacataccgtggcatcatgacatatccggaagtggaaaacgctgtttctgaaatcattaacgaagcgattgttaatgaacaaggaaaagatattgttacgatggatcttactaaaacgaattttagtaaaaacatccaagataagatcatggaagaactcgataccgtaatgaatattcacgatttcgataaccgaggctctcgtttattccgtgattggtatgttgattcgcgtatctatttccataaaatcatgcacaaaaatgaagctgacggcatcaaagaattgcgccagttagatccccgttgcatggaactgatccgagaatcggtcacagaaaccctacccggtggggttaaaattttccgtggctatcgtgaatacttcgtatacaccgcaccgaaaaacggttatagctacaacggacagatttatagtcacaatgacaaggtaaaaattcctcgctctgcgattgtttacgctcatagcggccttgaagattgcgacaacaacattataggctacctgcaccgcgcggtcaagccagctaaccagttgcgtttgctggaagatgctatggtgatttaccgtattacccgtgcgcccgaacgtcgtgtgttctatatcgacgtaggtcagatgggtggccctaaagctacacagtacgtaaataacattgcacagggcttaaaaaaccgtgttgtatatgacgcgagcactggtaaagttaagaatcagcaaaataacctgtcaatgacagaggactattggctgatgcgtcgtgatggtaaagcagttaccgaagtttcaacgcttcctggtggcactgccttctctgatatcgacgatgttaaatggtttaaccgtaagctgtatgaagcgttacgtattccgttaagccgtatgcctcgcgatgatggcggtatccagttgggtaacgatggcggtattacccgcgacgaattgaactttagcaaatttattcgcgaattgcaaattcaattcaaccctgttcttgcggatccgttaaaaactaacttgatcgcgaagaaaatcattacagaagatgaatgggatgaaaacgtaagtaagattgcttttgtatatcagcaagattcttactattccgaaatcaaagatattgaaattttggaacgccgtttaaacctgatgggacaacttgaaggggtggtcggcaaatatatctcccataaatacgtaatgaaagaagttctccggatgtctgatgaggaaattcaaagcgaagccaaacagatagaagaagaatcaaaagaagaacgttttaaaaatccagaagcggaagaggaaaacttttgatgaaagaatttatcgaagcaatcaaaagcggtaatctggtggaagctaaaaaaactttttactccatcatggaagaccgcaaagaagcgcttcgtcacgaattgcgcgttgaacttgccgaagctgtacgcatcgaaggcgaagaagacaaagaaaaagacgacgaaggcgctgataaagatgacgaaaatggcgataaaaagccagccgaggatgataaatccgataaagatgatgagtgaggtgtgtaatgcaacttgacatcgaaatcaccgccgaagatctccaggaacatttagacgaagcgaaagcccgtgtagatattctgggtatcgatgaaggcacggttaaaatcatcgaaaatttggcggtcaccgaaccaaatttagcccttgctatgatggcggttgttgaaggtttaacacttgatgaggtaattgtcaagcatgttgattcccgtggcaacgtagaacgcctcaaagacaggaaaacccgtgagcgtaatgcgtatcagactaccggattaaccaaatcccaacgtcgccagatcgcgcgtcgtgctctcaaaacaaaacgtgctaacccgtcaattgctactcgcgcacaacgtaagcgcaagaaagcattgcgtaaacgtgctgcactggggctataaatatgaatgaatcccaaatcaacgaaaacggcgatatgcttttaatcgaagaatggggtttaccttgcggtgacgtttcagaatctattttagaatctgttggggaatcaaaagacggtaaattgcggatcgaaggtattttccttcaagccgaaaaggttaaccgtaaccgtcgtttgtatcctaaaaacgtacttgaagaagcagttaacgattatattagaactcaagttaacacccgtcaagcattaggtgaaatgaatcaccctccgcgcccgaatgtggatccgcgaaatgcttgcatcctgattgaaaaattgtggtggaagggtaacgatgtttggggccgcgctgttgttgttgaaggcgacggtggtgatggtgacaaactggcggcgttgattcgtgctggttgggttcctggtgtttcttcccgtggattaggtaagctctccgattccggcaaaggctacggcgttgtacaaaagggctttaaattagctgtaggcgttgatgtcgtctgggggccaagcgcacctgatgcatatgttaagcctatagtggaaaatcagcaaagcaaaccgcttgttgagaataatagtgctgatgacgcttttcgggaattgtccgagcgtttgaaaggtctataaatacattaaacaaaacaacaggaaaatcaaaaatgcttaaagaacaactgctggcggaagcccagaacctggatactccggtcgagttagacagcattttcgaatcagttgaactttctgatgacgtgaaagcgacattcaccactgtattcgaacaagctgtaaaagctggcgctgcaaaactcgctgaatcccacattacccagatcgcggaacgttccgacgaactggtcgaagctcaggtaactgaacgtgccgctgaaatcgaaactaagctgtacgaagatgctgataaatattttgcgcacatttccgaagaatggctgaaagaaaacaaagaagccgtttcccgtgacatcaaagccgatctgtttgaatccctgatcatgggcctcaaagaagttctggttgaacataacgttgtcattccggaagaacaggttgatgtagtcgccgaactggaagacgaactgactgagaatcagcaggaagttaaaaccctgtttgaagcgaatcaggaactgaccaaagaaatttcagaaatgaaacgcaatgcagtagtttcagagaaaactaaaggtttgaccgaatctcaggtcgaaaaagtagaatctctgattgaagggctggaatattccacaaccttcgaaaataaactcagcgcaattgttgaaatggtagcaaccaaagctgaaaaacccgttgacgagtctgtaaatactccgcaaacgaaagataactttgttccggtagtagaaagtgttccggcagagaaatccaagatcaataaatatgtacaagcggcaaaagccctttcttaatttcaaaaggtaagaaacaatgtctaagaaaaacgaattgatggaaaaatggaacgatcttctggagtctcaggaaggcttaccggatatcgctaccaaatccaaaaaacaactgattgctgccattatggaagcacaggaaaaagacgcagaagttgatccggtttaccgcgacgagaaaatcgttgaatccttcggtggtttcctggcggaagctgaaattgctggtgaccacggttacgacgcaaccaaaatcgcttctggtaactcaagcggtgctatcaccaacatcggccctgctgtaatcggtatggttcgccgtgcgattcctaacctgatcgcgttcgatatctgcggtgttcagcctatgactggccctactggtcaggtgttcgctctccgcgcagtgtacggcaaagatccgctggcttccggtgctaaagaagcattccatccgatgttctctccggatagcatgtactccggtcagggcgcggctccgagcaacggctttaccgaactggcttccggtactgcgatcgctgacggtgctatcgtgttccacgatttctctgaaactggtcgtgtgttcctccagaacgtttctggctctccggttactgtaactggttctaccgacgatgctctggatgctgctgttatcgccgaacaggaaaaaggtactctggctgaaatttcttacggtatggctaccagtgtagcagaactgcaagaacagttcaacggttctactggcaacccgtggaacgaaatgggcttccgtatcgataagcaggttatcgaagcacgtagccgccaactgaaagcacagtactctgtagaactggctcaggatctccgcgctgttcacggtatggacgctgacgccgaactgtctgctattctggcaaccgaaatcatgctggaaatcaaccgcgaaatcgttgacatgatcaactataccgcacaggttggtaaaactggtttcactcagaccgttggctctaaagctggtgcgtttgacttccaggatccgattgatgttcgtggcgctcgttgggctggtgaaagctacaaagctctgctgattcagatcgacaaagaagcaaacgaaatcgcacgtcaaactggtcgtggtgctggtaacttcatcatcgcttcccgtaacgtggtttccgctctggctcgtatcgatagcggtatcactccggcaggtcaaggtctccagaagactctgaacgttgacaccactaaagcagtattcgctggtgttctgggtggcgtgtacaaagtatacatcgaccagtatgcacgtggtgattacttcaccgtgggttacaaaggcgataatgaaatggatgctggtatctactacgctccgtatgttgcgctgaccccgctgcgtggttctgatccgaagaacttccagccagtaatgggcttcaaaactcgttacggtgtaggtatcaacccgtttgcgaactctcgctctcaggctccgtccgaccgtatcacttctggtatgattaccaaagaaatgttcggtaaaaacgcatacttccgcaaggtttatgtgaagggactttgatcctaattcgttgaaaaataacgatattaaagggaaccttcgggttccctttttgtttatataaatattgaaaacattcgaggctatattatgaaacatatcatttataagataacaaacacaatcaataacaaaatatatgttggtgctcactcaaccgaagatatcaacgattcatacatgggttccggtattgcaatcaaaaaagcgcaaaagaaatacggtatgaaacatttcataaaagaaatacttcatgtatttgatacccgtgaagaaatgtatgagaaggagagggaaatagttgatattgaattcataaatcgaccagatacgtataatgctggtattggcggtaaaggtgctccaatggcgttgattggatggagtgatgaacaacgcaagctgatttctgaaaatacttcgaaagttatgcaatctccagaaatgcgcgaacgtctttcaaaaatcaaaaagggaagaaagcaatcccaagaatccaacaggaagcgctcagagacgttaaaagctaaatatatgaatggacgtatagacagagagtataaacctctcacagaagcgcacaaggcgaaattaggccgttctgtatcgatagatggagttgtatactcatccggatcggaggcggcaaaatcccttagtatgtcccactctggtttaaaatatcggattaatagcgacaaataccctacctggaaatttgttgcataaataccattatacactttacgcaggaacataaaatgagtgaaaaattttacacaattaacaagctggtgcgtcagtcacagctaccgcctggcctgtctaaaaaggttcttgatgaggcaaccggaacagaaacaattaacgtagctaatacccgtccggatctggtatctcttacccgtgcggtaaacaacctgatctacggtgaacttgtagcaattcaggaaactaatttgcctaccgcaaccctgttcggtgtgcgttatcgtaaccctaaaggcgatatgacgttttccagcgctgctacctattccggtaagtatgcaagccgtgataacattccagttggtgcggttggtactgcctataccaaaggccaagtttttaaacatccgacaagcgatgtcgtatacgaagcaactgatagcgtaactctcgcaggtgctgatattgatgaagcaattatggtcgcagtattcagcaataaattacgcctggcaagcgaagccgcgccaacaagtcagtatgaaaccagcgaagatattagcacaacttctttcgaaatggatcgttggaatatcaacgttcgttcccgtaaattcaaaactgaaatgaccgtggaacttatgcaggatctggaagcaaaccaattcaacgcagaaaatgtgattgaagatgttctgggtactgttgccagcgaagaagtaaacaaagatatcatccagactctaatcaacgtatcacatcgttacaacgttgatggtgtggtaacaaatggcattttcgatgctacaaccgcatacactgcaaaggatgctccggctttaggtcgtttcctgtatcaattagtgtgtgaaatggggcaggaaatgaatagaacgacttcatttgaagctacctatgttctggcctcttctcgcgttgtaagcgttctgtctgcgtctggttggatgcatgaaactgatgaaacccacccgttagcaacaggtcgacttaaaaacggttactatgtctatactgacaccaatacaccgtttgattacctgctgactggttgcaagtacgatctgggtgaaatggatcatgttggctctctgttctatacgccatacacagaagctgatcaggcaggttcgatcaagatttctgttgatcctcaatccttacagcctaaagttgctattctgatgcgctacggtttatcggttaacccgtataccactgctgcaaacgaaagacttgtgaaaggtgatgactgggtaaacctctcaggtaaatctaagatgagtcagattgtgggtatcaaacttcctaaactgggttgatagtataacccaacggggataatattcaataggtggagtagggaaacttactccatcttttaataattattataattaatattaaattagatcttgaatttataaatgatttatgataaaatttattaattataattattatagatcaaataatttttgaaatcaagtaaaaataaatttgattttattaattagatcatgtataattattcttttaataatatattatattagatcaaataaaatttgactacaaattaatatagtatattatagatcaactgggtaaattggtgagtatgttatgagtttgaaattagaagatctgcaaaatgaacttgagaaggatatgctgatagatcccctcaagttgcaatcagaatcagcggatatcccgaagatttgggctaaatggcttcgataccattcaaacgctaagaaaaaattgatccaacttcatgcgaaaaaagaagctgatgtgaaggatcgtatgttgtactacaccggaaggcatgacaaagaaatgtgcgaagtggtgtatactgggactactgaaattaaaatcgcgatcgctggggatccgaaaattgtagaaaccaacaagctgatccagtattatgacatggtggtagatttcaccagcaaagcactggatatcgtcaaaaacaaaggatactctatcaaaaacatgttagagatccgtaaattagaaagtggtgcataatgtctactgaaaatgaaaaatgtgtagtgtgcaagtgtccggttccttctactggttttgtgactgaatctgggcgcgtgtgtagtactatctgtgctgactacatcgcagaaaaaacaaaaaacggcgagatcaacgaatccgatgatctgaatgaagttcaaatgttgctgtaggaggatcttatgattggatacggtgaaggaattacagatcgtgatgaacatcctgatttttagtgcataaatactagcgtacccgaaaggggcttgataaaagaatgctggatgataggcgtactcttttgcgccgtccgatggagtttaccttcggcggggtgattgataatataccttcgatcaagggcatgtgaatagaatagccagaatagtacagcactggcgttaagcaaatgtacaaaagccccttcctttcggttggggcttctttttagaacttttcttcttctccgctttcgagttcggcctttaattcttcggctcgacctttcagcgcatcgcgcatagaaatatcgtctgacggcgcaacatcaacttcttttacacgatttttgtaatatttttcaagctctttaaggccgtccatagtacggcaagaggcgaccttgctcatgaaatcatcaatagccgcctcataaagtcgaaaatcgttgaaactcttcattttgacctctaaatttcgatttgtttgatcacgtagtcaaacttttcttcattgtaaatgcgtactcgttcgattgcgtgtttcataccatagtttttgtatgaatatttatttttagcatttttggactttgccagcgttgctaagttatcaaccaaatcccaaacagtagcaagagatttagaatcatgtttacgcagtacgcgcccaattgactgtttgactataacagcagatttgcaaggatgtccgaagatgatgtgatgcaggttcttgacagaaatacctgtactcagtacaccaatagaaccgattacgatcagccccttcgttgattccgcgatccgtttcatttcgtttcgctcatcaatccccgtttccccagaaatgtatacaacgttgtcatatacctttttgagttgctcatacagccatttaccatgtttgatctgattgaacatcacaaacacgttttcatctttttcccttgccagtttcaacgccagcttacagatccatgcgttacgcctggtatgcgatgttatatacttgatttcgctttggtaatcggcccccttcattttcttaatctcatcctctttgtatctcatgaagatggtattaattcgaaggttggtaacttgaccttcctgcatcaatcgatttgtatcaactggcttgaagatttgaccaaaagcgccaatgtattgcatcatgtttgctttgccttctttcagagaaccagaaagaccaaacttgaaaatacactgatccattgtgttgatgatcttctgtatgctttgtcctgttgatttgtggcattcatccaccatcaaacacatgaactgctgaaaccactcaggaggcattttaacagccgattgccacgtagacacgtagatcaatgcattactgtttttagcagttcctgaacgtattccaagcattgcctcgcgaggcaaaaggcgatagtttacaatatcaccgatcatctgatcaacaagggcggttgttgggacaatgattagtactttgcctgtgtaattttccagacaccaacgagatatcaacccctggataagagatttacccgctgacgttgggaggttaagcacagcacggcggtttttaatcgcatggaacaccgattgtttttgataccaatacggatcaatctgcttgtttccgtcgtatactgggtgttcttctaaccacttgtcaaaatctggctgggtaatttcttctgtttcgtggatcttaggatccatccagatagaatacccgcgagactccgcgaattttgttacaagataggctaaaccgtagggcagtttcccgttatagtccatcaagtatatgtagccgttccatccaccatatttgtattttgcctggtactgataacctggcggctggaagctgaaatagtcgcgcaattcatagactatgttagcctctgcctgaatctgcacatgactagtgttaaggaatttgacttcgatatccactatgtgtatcctatatacggtttatatgaatatttataggctaaataatgataaacattggagaactacaatgagtattgattacgaaaaggttgaaggtttcaaagccttagaacaaaaagaagccaaattacagcttgctacctatgcgcaagaaacgtttgatgtcaaactgaaccgccagaagtcattcgaaaatatgcttgctgatctggaagctgccgtaccagcagaaaagccggaactgttgatcgactcccctgatccggaaattgttacatacgaaggtaaacaatccgttcctgatgttgttattgatgtgactaacgattttatggattacgttaaagaggttgctccggaaattgcagaccagattgaaattgttcctgacgctctacaagctactgtaagtgattctgagacggtttctgatgaactggcatggatggaagggtttaccccgtctatcatcatgatgggccgctctgtttcgaatactggcttttatacgtgtccgtattggatctatgattggatgaaacaaaatccggattggtacaagcaccctgatggttgccctcattattcagcgcgtcaaaccctcaagtcgctggcatggtacatgcatcgtgatgggatggttactgtacgggaaaccagaaacagccagttcgacacgttcaaaaaataattttaaaaagtagttgaccttaccctgctattcgagtatatttgtattcgaaggcgggggaatggctctcgcagtgaagaaggaaatacaaaatgaacatgatgaaaaatgcttactacccagttctgtttgtttggactaatggtgaagttaagaaaatcgtcaattctaaagctccttattacactgttggtgaagcacttcgccacgctgcggaagcaaattatcctgctcatgccgaacctggttatgctcgttggaacggttctaaatgggttgctgatacctgggacaactacgaagaagaaagaatggagtgtgatcctgattacgtatctcgtcaaatggaagctcatatgattgcagatcgtagactggataatgaagctcgcggattttattgattaacaaggggctacggccccttttcttttaggtgaaatatgaacttaaatcacgaatgtttaaaagatttgagcgatggtaacgagattggtaacgttatttttcttgatatcgatggcgttctaaataatatgcggtgcatgaaatttggtgaacatatggacatcgaatgcgcacgacacttacgccggatagtgaatcacgctaattgtgatatcgtcatttcctctacgtggagaatcggcaacagtacccataatctacgtgaaatattttatccgtggggattgtatcggatcattggtaaaacttgcactaacttccctcatagcactggaatgcgtggtgatgaaatcaaggcatggatcgatactttcggatgtaaaaactatctcattcttgatgatgacaccgatatgctttcttcacaaaaagatcattttattaacactgatgggtttgttgggttgaccgaagaacaatccacttatgcgatccgtaacattttcggggttactactccgttttgtcctgaatgcaatgggtatggacgtgttaacggctacgacaaatgcggaacgtgtaacggtaaaatactccggctataaataccaataaacataagaggttaaatttatggcaattccttctgtaacaattagcgccaacaaaaacgaacttttgattggcgaaactttgaccttagaggttgaaactactgaactagatccgggtgatgtgtttctggcctatcgttggcaaaaagatggtgtagatattccaggcgcaaccgccgatacttacacaactacggttgacggtacaactgctggtgattataccctgatcttaaaacacggtgctgatgaagaatcagcaacagaaaccacgtcagatacaatcaccgtgacaacttattctgatgatctcgtttctaaatggacggttcacccgattccgtggcgtgataccagctttaccccgatcggttattgggtacttgatgaaattctgtatcagaaagcacagggtaaagattggaaaactgattatgctgattacaagtatagtgaggaagtacaaacgatcctgaaagcgttcatggaaaacggtgaatgtgagatccaggattcacgaaacggctatattcataaaatgagtgaaatctaagaggctttaaatggcaactgaaaaatggactacggttcatcctattccgtggagaaataccagttttacatatcttccatactggctatacgatattatcgttgatgcttttgagaaaggcgacgactggcgcgattatgcggaagaaaaatataaattagagtttgatactctgaaagaggcgtttgaagattatggtgatattcatgtaatcgaatctcgtaatggtaaactggttagtctgttgtcattgactcctgctcctgaaccagatcctgaccaataaaataaggcaaacaatgaatacacttctttttgatttcgacgacactttagcagaattttctcagactttttatgataagttcggtgtacgtccggaaggaacgccaaaagaacgatatgacgaaatggcggcttctttggtgcgtactgatttttataaaaaccttccccgtattcaggctgggattgacctccttcaatggagtttccaacgccgaatcggtgatcctgctactttgctgcttcgcgcggaagcggtcagccctctttgggttatgaaagaaaaactgaactatactgataagatttgcgctgaactggggatctctcgtctcgattttagtcgcattgactatccggaacagttcgcagaacatgcctatcgtggtgttctgatttcccgcaaccagaaacatcttgaaatctggaacaattctcatctagctaataaagttccaggtattttccttgcggaaaccctggaagaaaatattcagctagtcacggaagcgcttgcaaaggctaatcaataacaaaaaagggaaccgcaatggttccctttttttacaatctttttaattcatcaagcgctgttttcttatcaccaacaaagaggattgctttacctcctgcttttctgaaaggcaacaccgcttttgcccgatcgtcaaacagaattcctttaccagcgaatgctgctttttcatggctacttttaacgtagtggaattctggaacgtaacccaatactttttgtaatgctttacgtttttgttcggcaacaccgtcagaattgaatttaccgacactggttagtattgctacatcgccaagtgttcttaaatgatggaataattcaaatccttctttgattggttccagattttcgtagaaatcagttttggcaatttttgctttgcactttttcaactcatcttctgtcatcatcgagggttcgccatacattggcacaaatgaaccttcccagtcgaacaatacaccatccatatcaaagaaaaacttattcatatcaattcctcagtttgtgtatgcatactataatgtttaatcattaatgtcaatcccaagtgtcagttttcggtgcgtatgctgcaactttagccacaatttccttatccagttcagctacagatttctgaggcttaccacgggctttaactttgatgtagtttgacttaacaacaaacatccctttgttacctgatttcttgatctcgctatcaacaccaactttgttaaagctgatccaaatgtcgccgtccatatactgtttaagagaatcacccatgttcaggatcttcgccatagtaagggccgcgccttcgtgggtatccatgagaatttctttaggaactacacgatcgcgtttctggttctgctgcatagcaatatgcacatcgttcataacccatacgatatgtacgttttcttttttgtatcccagcgtttcgacatcacgcgcgatgcttgccagcttgctcatgccttttaacgttacgtcaaagatgaggttaggtttacgatcttctggtgctgccataataccggaataaacacggttttggtttttgttggaaatgttgaaaacgtcggcgatcacatgatggagggtagatacgttttctgggtttttgaggttcattgttttgacatcatgacccgtttgtttcttgatctctgctgcgagtttatcgctacccattacaagttttttcagggcgtcaacgtccagtgtaataccttcgatgcctagcagtttttccagtgtgaatcctttaccggaaccagcaccgccagccagaataacaacctgaccaaacttaggataagcacggcccccgaaggtgatcagcgcttcggttaaggtgctttctgtgaattgtttaaatgacttcatgtaaaattctccagtttattttctattatttattgacatgctttctgacagtggtgtatggttatggtgttcgacggataggccggaagaactttaaaccataaggtatatgatatgaaaattgatttacatcgcttcattgcagaattttcccgcgaccgcgacatggactctttcaactactactcccgtgaaattgaagatcgttttgcggctcatgttgggttccgtcgccaccatactcctaaaatgcgccctgaccacgatccgaagtatagccctatcacatggcaagccccgatcaatggttacgttgaagggatccggatcatgacttttaacgcgatgtatggaaacgctttgatccatattgcacgtgagaaaaaggcagaattccctaacggctggcgtattgatgaagtgattcaaacccttatgcagttacgacgtgaatacaaagctggtatgtgtctgcgtaatgaacagtatccgatgtataaaacgtatgcctatatctctaagcatctaattaattccatgttttacatcgttggtaatcatggttccgctatagatatcggttcttatgaaatcgtggcttatgctcgcgaacaaggaaaggccgctgcactgaaaatcattgaatctggtgctatcattcttaaccatcgcattgatactattgcttactatggcgatcaggttgaggttgaaggcgtacaccatgaacgattcaacaaagccgtatttgctaaaaatggttatgcttatggtaatgacattataacttctgctattcctttcgttcgtctaactgttgaaggatttggagaaaggttgccttataaactgtcagaagctcaaatgtgtgcggctgctgaaagaatcgccaaaaagcggaaaatgtataccgatgaatacctggcgtatgtcaacaagacaaaagaagatgtagatcgagaaatttcttgcatggatttgtgcctttgatataatgtaagcatcttttaaagggaggatgcatgaaaacgatacattgcagaaatgaaaacgttgtttactatcacggttcgtgtactgctgctggtattgaaagcatgttattgcctccctgtgattctgatactctgtctgaaaaaggcaggaagaaaaatttagaccgtgttttctttaccgctgatatcgggttagctcgtatatacgctggaagggccgcgcgttctataggtggggatcctgttctgtacagggttgtgtgtccggttgatgttgtatgcatgaacgaagacaaaggcgcgagcgtttaccatgcagcatgggcgttttgtgaggaattatgaatgataaagtgttggcgtatctcgttttcttgctgggatatcgcttagaagtgatgggcgcgtattcatcaatgtatggtgatttaacggctatctggatggtcgggttaggggttgcttttacattcctttcctttgcaattgttaatgaatcggaaaaggatattgtatgaaactatatcatgtgatctactctggtgttttaggcattgacaaacaaatgttagttgatgtaatgtgtaaaaaactcgatgaacgaattggaactcgatacaaaaatcatgtatcggaaagtattttcatcaacgttgaccatccaaatgacatggaagaaatggttaatactcttgatgatcagcagatcccgtttgttgacaatttcaacatgagcgctggagtgtatacggtagtaacttttgttctaaaaaatgttgacagccgaaacgatagcgtgttgaatgtagttgcaaaaatcgattctaccaaaggaaaataatatgaaaattgtacaccgtagcatttccgaactgtctcaagccgaaaaagtgcaaattcatttcaaattcaatgatttgcgtaaaggttatgccgaaattgcccgtgaacatgggttagataacggcgatatttaccaggtagtacaggaaattgaacgtatccgcgcgttccgttctgcaaatctccctgttaaaaatgcaatgcgccgtgaagcgatcgaaatccatcgtaagcgtgtgtacaatttagaacgtgctaaacgtccgatgaagaaagaaaagaaacctcgtccgtttaaacgtgaacatcttaacacctctatggcgctggcgtttcaagatgcggggattatctaatgcgtaaatctgcgatggatcgttgggctagtattgctacttcaaacgtaaaaccaaatcaagccgcgcctgatgtagaagcggttcgtaaagcaaaagaacctgagatcgtggcccttagccctgaactcatcgagcatcgccgtcgtgcgtctgctattgaactggatctgcgtattgcgcgttcatataatctcaagcatgaacacgccgcaaagaacaaccattcttttgaccttactctggaagattggaaagtgttgatgacaactgaacgttgtcagtattccggcaagatgtttagcaataaaccaggtagcccatatgcccgtacaatggaacgtattaatccacgtctgggatatacacaagaaaatacaatagcggttatcaacgccgctaatgccgaaaaatcacagcttgatgcattcgttaagggtgatgtcattctggatgaagtaaaagtgaagttgctgcgtaaagcactttatcaagtcgaaaaacgtgtgaaaatgaaaggttaaattatgtttaagaaatattcttctctgactaaccattatgaaggtaagttcatcaatggtgtaattatgaacgggcttactggcggtgtgtgggttgcacgtgaaaagatccacggtgctaactttagctttatcaccgatgacggtattaccgttacccccgcaaagcgtactgatgttgttaagccagccgaagatttttatggctgttcagcagtagttgcaaagtattccccagggatccgtaagatgtgggaaaccctcaaaaagaccggaacttatgatgatttggttattcaagtctacggtgaatttgcggggcgtggtgtacagaaagatgttgattacggcgaaaaagatttctacgtattcgatatccgcgtaaatggtgaattccttccggataacctgtgttcgctgatctctcgatctcatggcctgaaaatggccccgctgttgggatacggtacttttgaagagatcaaagaactgccgatcacgtttgaatctgttgtgaacaaagcaaatagcggcattggtagcgataatacagtatatggtgaattcgtatatcctatcatggacgttgaagagggcaacattgcagaaggttttgtaatgaaacctgtttcacctgcttttatgccaaacggtgaacgcgttgcaatcaaatgcaaaacaaccaaattcactgagaagaaagcgaagaaagcaacccgctttaatgctccggtttcactgtcagaaaaagacaaaaaccaactcgatgagtttgtttgttaccttacagagaaccgtgtgaaaaacgttctttcgaaactggatctggcttcgatcactgcgaaagatttcggtcgcattatgggcttaacggttcaggatgctatcgaagaaatcagccgtaatcatgggcctttcctcgaacagttcgaagacccagcaatggctaaaaagttgtttgtaaccgaagcccaaaatatgattcgccctgtatggggcaaaatcctgaaccatgaattttaaactatgaacagtcacggaaactatagaagtatttctgatgaaatagccgcaataagagaactccttcaatacgtttcagttgatattacttctggaaatatcgtatggtcttctccgcgtcaaggtaggagggttggtgattccgctggtactatgaaagatggatattgtgttataaagtttcaaaagaaacaatatcgcagacatcggatcatcttttatgttgctaatgggtatcttcccgctcttgttgaccataagaatggtgttgaatttggtgatggtatagataatttgcaagaggcaacgcaacaagagaacataagaaagcagataaagaaacgaagcaatgcttctggaaaaagaggggttatttttgataaaagaagaaataactatcaagcgcgaatagttgttgatggtaagcagatttttctaggttcatatgataaccctgaaaaggcttatgaagtttacaacgaaaaagcaaaagaattgttcggtaatttttatgtcgaatgattttagtacagtaattaaaactgccaagacagtaacattaattggcagtcgtaaacctcctgaacgtatcgcaaacattgctgttaaaatcggacgtgctttgaacgaaagcgggatcagggcttattctggcggcgctcctggtatggatagtcactttctgtttgactatagtccggataacagatgtataatccttcctgagaacgggtttaacggccttttctcaaacggaaaggatatcatcgactttcgagatttaaacacacagaaagccgctgacgaagccagaaaggtagcaggtaacttcgatacacagaatgaatacgttcaaagaaggtatgcgcgaaacacgattcaagttcttcgtgaaaatcttgacaatccaactgattttgttttattttgggcggaagaacgtgaaggatgtgttaaaggtggaaccgcgatcgctgtaagattggctaggttgtacagggttccatgtttcaatctcttcaaagaaagtgtattgaacgatgtgtgtgatacgttagggatcaatatcaaacccccaacgttggattttttatggtaattgaacatgcgcccttacttcgtgaaacatacgaaagatgggctgttaataacgcaataggtgaaaatatgattcatgtacgtagtatcggtactgacggcgaaactccggtagaaggccgatcccccactctcgcagaacgagcaagagaaattatcaacgatcagaatgctaagatgatcgaacatgcgcgggatacaatcacaaaaggtgttctgaaacacgcgacacaacaaaaccttatctatgatatgaagcacgatatcggctcttgtctgggtattgaatgtactcgctatgcattccaacgagtttctgaatggttggaagaagaagggctaaaattcgatacagaagaaaaacgcaacgccgctaagatcacaaattctctggctagtaagtacaatcaaacgtatagaaaccaggaagaacgtgaagtgttcggtttcaaaattcctgaaaggaaaacagatcgccgtgtaagtgaattcactttttacattagttggtaaaaaggtgttgacgggggttggttatagtagtattctaactcccgtagacaagacactaactcagaaggataaacatcatggaaatcgtaatgaaagcaacttatgctggatactgcctggaagcaaaaggtgttgctaacaatggtaaaggcttacgggccaatgttgaagcaatgctggatgaattacatgcaatgtacgaatatgacaacgtagcgggtagtgttcttatccaagcgttggaagtcgatggtgttgattgtgctggttggtgggatgcttacattgactacaacgataaccgggtttacctgttgagcaacaaagattatttctaaggaaccattatgagcgatgaagctgaggctttagaagattgggctgattttgatgacgaagaagacggtgaatatttctgcgttaatcgtggtgcttataaagaccgtttagaactccgtaaacttttatcgggttcctctcaaatatcaggatccaaacgaaaaagtagtaaacaaaaagttcagtatagtgatggttctgtacgtgatgaaactgttgttgctgaattccgtggtcgggttatcacaaaagaacgacaaattgatgtaaagaacttgtatgaagtggctaaggctgctaaaacaggttctgtgattgtttgccctgtgtgcaaagaaaaacacacaaagacaacgtatcacaaagttttctgttcgaatggcagaaaaaccagtaaggattgtaagtctaaatatcacaatacaatctatcccgaacgactggatcgggtattttaaaataaacttaaaacgtggagtacgtttatgaacaacaaaactttcgaagaactgaacagcatcatcacttccgtagattcctataaggtttctcactggtcgcaatatccaactggctccgaagaggcgctgttttatattgaatctcgtggtggtaaatttgatcaagtagttacggctggctgtaaccgccttgcgcaaatcctatcacgtccggtgactatggaaaacgtagattttgctaatcggttgtacaaaatgcactttgggcgcgaaatcttcaactacaaaggttggaaagaaattgcagaactgggttacatccctcttgaattcagagcgattccggaaggaaccccagtagcggttaaaaatccggttgcaactttccatgctgggaaaaatgcgctgtggttagcaggacacgtagaaaccctggcgatcaggggagtatggtttccttcaaccgtagcaactctatcccgcgaatgtaaaaaagtgttgaagaaatatctcaagaaaacctccgatctcgaaggtgaagcatttgatatggtattacgtacccgtttgcatgacttcggcgcacgtggaacctcttctgctgaatctgctggtattggtggcctcgcgcacctgtataacttcctcggtactgataccgtagaagcgctgattatggctatctctctgtttgaagattgtcagaaagcgtttgatgatggtgaaatggcggctggtatttcaattcctgctcgcgaacattccactaccgtttcttacggcaaagaaaacgaagaccttgcgtacaaaaacagtattgagatcttcggagaagggatgtatgcatgtgtgtatgattcctgggattttaaagcggcggttcgccgtatcgcagaatataaagattctattctttctaagggcggtactctggtagttcgtccggattctggtgatatggtagacaatatcatgtacgctcttgaagaactgggccgtatctttggctatacagtgaactcaaaagggtataaagtactacacccagcagtaaggatcattcaaggtgatgaaattcatggccctgaaacaatcaatcgggtgttgaactggatggagtctaaccgttgggcgtctgaaaacatcgcgtttggtatgggcggcggattgcttcaagaagttacccgcgacactcaaaaatatgcgatgaaaatgtgcgcaatcaaaattaacggtgtgtggactggtgtgtataaatgtccaaaaggcgctgaatggaaaaagagtaaaaaagggttgttgatgactatcactgatggtgttaactttaaaaccattgatactctggaacagaaagtgccggaaggctggaaagatgctatgatcacatactatgtcaacggaaagattacttcccgtgacactttagaggaaattaggaaccgtgccgggatttagtatccgcaaaaacgacaaaggaaccgtgattttctatgacaacatgccccttgtagctcgcaaggggctttttgctaaaatcgctgggtattcctttaaactggaagaagtcaacgacgaaacactaaaagagatcgtaagaattgccttacagttaagaggtaagaaagacgaacaaagagctattgacatgatcaataaattgggcgaaactcaatgcttcatagtgaatcgtggttacaagtacgataccattgcaaaatttgaaaaagggctttgtgaattatgagttattatggtgtgatcccatacacaggaaacaagcaaaagctacttcctgaattgttcaaattatttccggacagaaacagctatatgcgattcattgactgtttttgtggtggtttgagtgtgtccctaaacgtccctaaacccgttctaagcaacgattacgatcggacgttgattgatatgtataagcgccttcaaatgcttcctgacctctctccggtgcgagaattgattaaacaacatgggctgggtaagaacgagaaagaagcgtatctcgcatttcgtgatgcatataataagaacaaggatccgctatggctctatgttctgatcctgcattcgtttagtaatgttaatcgaaccaacgataaaggcaattttaacgccaattttggttgtagaacgttgaatgattctaccgttaaacggtttgaacacttcaaaaacaatgttcggggaattgaattctctagcgcatcgtttaaggatcttgatatctgtttgaatgattttgtgtactgcgatccgccgtacctgatcactgatgcagtttataacaagttctggaacgaagaacgcgagcatgaattatatgattttctcgataatttaaactctgatggtatcaagtttggtttatcaaacgtgacacatcatgcaggaaagcaaaatgatatcctgatcgagtggatgcaaaaatataatgtgcataacctcgataaaaagtatctgttaggccagcatactgattcttacgaacaaaataaaacgcaagaagtctacgtgtgcaactaccagaaacgcgacgtaaatacataccctgaaacactggatgacttaatgtaaggtaacatatgtttaagatttttggttatatcccttctgtttacaattgcgctccatgcctgaattctaaacgtctcctggacgcaaaacgaaaagaatatgagtttgtttctgtagccgatgaaaaagacgcagacggcaaaccgatcctgaatgaaacggtcatttctgaactcgaaagcctgttaggtactcgtagactgaccatgcctcaaattttccacgatggtaagcacatcggcggctttgaccaactgcgtgagtacgttcgcacgttgggataaatattaacacctttatttgattggtgttattatgctcactaaacgtattactaagaaagattatccatccattaaacaagctctttttgaacagcaaaacggcttgtgcgcgttatgtggtcgccctttagagggtggccttgaaaaacatcaccttgaccatgatcatgctctatctggctctaatgccggacgtgtgcgcggcctcctatgtaacctatgcaacggtacagaaggtattgtaaagcacaaatttaatcgttctggtctggtttcccgtgatgttgattacatcgaatggctagaaagcctggtagcatacctcaaacgcgattattcacaaaaccgtatgcacgacaaatttatacccgataaggttaaatggtttacacgcctgactaaatcggatatgatagccgaaatgatttctatgggctttgagtactcagaaactgaggatcgcaaggctttagcaaagagctatagaagacaattaatgaaggcaaccaaatgaaatatctaaacgctcgattatcaacgaaacagaagaaaaagctgatgatgttgatatccgccactgacaaaaataccatatctctgcatgattggatgcttggaatgggtgaatctgatttgtgttatgtcaaaccaaaagacagaccgatgtttgatgatcgcggttgcacattgactgctttttcttctatccccgttattgatatttggaaactccttgagattgtaggacgggatatacccgttgatggagttgaactaatcaaatatcttaacgaaatcggacataatttagatattatccataaggcaacgaaatgaatgtagaaaaacgagacggaacaatcgtcgaattcgataaagaaaaaattcgtaacgcagtttataaagctggcggtacaatgacggatgaagacagcgcaattatgcttgtattgcatagtcagatccgcaatggtaaaccaatgaagatttcacaaattcaagaacttgttgaagaatctttgatgaagacaaatccgactgttgcccgtgcatatatcgaatatcgtcatgatcgtgatatcgcccgtgaacaaaacggaaaattattccgtgatatcaagggtttgatgactcttagtaacaaagaattaaccaacgaaaacgcaaacaaagattctcgcgtattcccgactaaacgcgatcttctggcgggtatcgtttctaaacatatggcgcgtaaccatattctaccgaaacatattgtagaggcgcatgattccggtgatattcattatcacgatctggattacagcccgttcaccccatacactaactgctgtcttgttgacctgaaaggcatgttagaaaatgggttccggatgggtaacgctgatatcgaaccgcctaaatcaatcggtgttgctactgctcttatggctcagatcaccgcacagattgcttctcaccagtacggcgggacaacctttgcaaatgtcgatcaggtgctggccccttacgttgaaatgacgtacaacaaacactttaaagatgctgtttggtacggggttcctaaatcaaaacagtatgcgatggaaaaaacagaaaaggatgtattcgatgcgttccagtcatacgaatatgaagtaaacaccttacatactgcaaatggacagacgccttttgtcacaatcactttcggtatgggtactggttggcgcgaacgcatgatccagaaagcgattctgaaaaaccgtattcgtggactgggtaaaaaaggcattacccctgtattcccaaaactggttatgtttatggaaaaagggattaaccttaatccggaagacagaaactatgatattaagaaattggccctggaatgtgcttcaaagcgtatgtatccggatattattagcgcggctaataaccgtcgtattactggctctagcattcctgtatctcctatgggttgtcgtagtttccttagcgtgtggaatgatgagcacggtaatgaaattcttgatggacgtaataacctgggcgttgtgacaatcaaccttcctcgtattgcgattgaagccgaagcacaggaagatgaagacgcgcatgatgcattttggcgtatccttgatgaacgtctggaactgtgctttgaagccctgatgactcgtatcgatagcctacgcggtgttaaagccagtgtagccccgatcctttatacagaaggtgcgtttggtgtaaggttgaaacccgatgatgaaattctggaactgttcaaaaatggacgcagttctatcagtctgggatacatcggattgcatgaaactctgatgcttttcggatctggacaacacccattcgaccggatcggttctcagaacatgggtagactgattctggaatatctacgcgctgcgaccgaagcatggaaaaagaaaaccggatttgggtttagtctgtactcaacccctgctgaatctctatgtcatcgtttctgcaaactggactatgagaaattcggaagtatcaaagggatcacagataaaggctggtacactaacagttttcatctggacgttgaccgcaaggtaacaccgttcgagaaaatcgactatgaagccgattttcattacattgcaactgctggacatatcagctatgtagaattccctgatatgaaaaacaacctagaagcccttgaaaaagtatgggattatgcaatggataaactggactacttcggaactaaccttccggttgataaatgttttgaatgtggctcggatgatgaatttaagccaacagaagacggttttcattgtacccattgtgggaaccatgatccggaaaaaatgagcgtcacgcgccgtacatgcggctatttgggtgctcctgctgtccgtgggttcaacgaaggtaagaacaaagaaatgatgcatcgcactaagcatcaaaattaatcaaaaagcccttgacttcggttgagggcttttgttatattgggcctatcgaaaaggagacatattatgaaactgactaagaaaatgaccgatgtagtggcatgtgcgtttgcattaggctacaaagttgaaaatcatccaactcgcgttgaagtcatcaaccctatcaagggccgtcctggtttggttctgtgtgaagacggcacagcatatcgtaatgatgtctctttagaactggcaactactatccgcaccgcaaaacaaatgaaagatgttctcattagcggcgcaaaattgagggctttatgatgtattggacaaaagataaatttgtttttcgtgatgatacgtgctttgggactgcataccgaaacttggctattcgtggcggttcgttttcggctaatgatttgtctaaggtagtatttcctattaaagttactgagtatgacgtattcggtgttaaaggatttactgattactttggtacaaagtttgaatcagaatcttacatttttactaatagcgatcgtgaattattcaaaaaacacgttgttgttaaagagaaaccgttattaccaaaagaggatgaagcaaaggaaatctatgatctcctgaacatgcttgacaatctcggtacttgtcatctgttcggtaaacgcgcccgtaaagcgaaagatgttctcaacttgttgcgctctcgccggaattacctgatccgggaagctgaacgcaatctgaaaaattcagaaaaacaggctgaaatccataaatccacccttgctaaattaaaggctttgtgatgtttccgttatacgctaaagtgcgtcgaaatgtcgggaattcatatcaggaatggagtgaatggctacgtgaaacaaagtcattctacatttcaaaagcaactgatatgaaaggccgtaacattcgctatcgtaaacccagtggtaaacgagtgaatgggatagattacattgttcttgattcgattcgggatgatatacgataatttaactttgaggcaatattatgattttcaacaaaacaaattcacgtaatttgaactatctacgctgtgaactggaagctaacgaaattgaactgtttttctgtggggctacagatccggaacacaaattgcattgggtatcaggtgagattgtaagcctaaccgaccagattgttgaagaggctacccgtcgcgatgcaatagttaaaattggtgctgttgatgtgaactacgaagggcatccttcatttttcattcaatattatccataaaagtattgacctgtatatctgaatgtagtaacatccttcttgtcaactaaggaggatgttatgaaaatcaaaaacactgctactgaaactctttgcaacgaaattgcagaaatgtactggagtaaaggtcacttagaggctatgaaagagtttcaaaagtggtgtgatacccaaaagttagctaaatgggaatacatcgttattgttgaacggatcaaagaactgatcctcgtgaagaaaggtaacatgaaatgattcaactgaaattagacacaaatgcggtgttaagcctgtttccggaaggttcaaccgcccgcgtagatctccaatctgctatcatcaaaaacgtggtgaataacgtagttggtaagcgtgttagcgaagaaatcaacaaacggatccaggaacagttagctgttctaatgccgaactcatccgaaattacacagatcatcaaatctgaattctcggattacgtcgaaaaacgttatgggtattccaatgtttttgatgtcaactatggcaatgttcgcgaactgtctggtaaaatcaaagaatcggtaaaacagcaatgccaaaccattcttaaagatatcgagaaagaggcgattgctcatgcaacagaaaacattattgcagacgaagccgcgtttatcgctcgcgtctcgaataacctggaagttactgtacgcaaagcagtaatgcaacgggttaacactcagttcccagacattattgacgaagcgatcagagaacgtctgtttggtgaaaaagcatgaattacgaccgcatctataatatggatgtggtcaacggaaaagggatccgtgttgttttgtttgtgactggatgcaatcataaatgcgaaggttgttataacaaatcgacgtggaatccttgcaacggaacaccgtacacggaagagacagaaaaccatctgatttctctgttgagtaatccgcatgttgatggacttacattaactggcggcgatccgctttaccgtgacaactatcctactatcctaaaactgcttgagcgcgtttctaaggaacttccaaagaaaaacgtatggttatggacaggatataccctggaggctttacaggccgacccagaacgttctaagctacttccttacattgatgttctgattgatggtaagtatgaaaaagatttaccaactaaaaagccgtttcgcggttcagataatcaacgtatgatcgaattcgctaaaaaatcgatagaaattaaaaatatttcttgacctaatgtgtaactatggtaatcttaccacatcgtaaatgacgattaactttaattgagagataatatcatgatcctgaatttcaaaacccgtaaagaagcgcgtaactactgctggaagtggaacattcccctgaaaaccatccgtaatacagggcgcggttcttgcccgtggacagttcaagcaaatgaactgaaaacgttcgtagttggtaaaacttacaaactggttgaccgtgaagggtttactaccaattcacacggcggatctaacaccgcaaacactatccaggcgagacagatcgaaaaattcctgaataacgaggtaaaaattatctcgaaaaccaattcagatactttcaaaattgagcatactccggaaatgacttttagctctctgcgttcgtgggaagctcgttatttcgtcgaagttggcgcggctccggttaagaaaacgaaagctaaaccgaaaaaagccaacgttacggctccggttgcgcctgttgcaccagcaaccgcagatcttgatcaaatgcttgatggcggttcggcaatgtcggttgaactggatccgactaaatttgttgaaggccgttcgtatgttctggttaaaccgcagcaatttaaaaatcgttgtggcgctaaccacgggatcaaatcatataccgatgaacacagtaatggtgtatacaccgtttaccatacgacttcgctcggtcatcatcaattgagcaaaacggtagaaaccattgattcccagaccggaaacggaaacgttggttactatctgcttgattctgaacgttcgttcttccgtgaactggcgaccggaactgttgatgaacctgttagcgtttccggtaatagcgctatcgctatcaatgtagacgaagcagctaagaaagaagaaatcgcaaaagcaatgacacagcttgaagaagcggttaaagcccatgatgacgcgcttcaaaatctgcgtactgcttccgacctggttcgcaaagctgctcgaaaagtagcagaagtaagcaagtaaattaaactgggtgctccggcacccttttttatgaggtgacacatggaattattagaaggtaaatcttataccctgaacatcgacgctaaagaatttgcagaaaaaacctggcgaaatgctttagctgaattgatcaaaaacaacggctatattacaatcgatcgtattgcgattggggatactgaggacattgcttatgttctgcaagatgatttcgaatatgagatccctagccatatctggaaatacttcaaaccatatgatttaccggaagaagaaccgaagattgctactaaagaagaaatcgccgcgcctgatttaaatttcgtatcttccgatcctaaaatgtggatgactgtaaaacctgttcaacaagatatcaatgatctgcgatttgattatccttttgtcaagcggatcacttcgatttctgtactaccagcgccgactgattcacaggcacttgaatttgcattacagcatgttttcggtgataataagctgtacgcgattgacaaggaagctgctattgatgaacagaaaaaggaaatcatcaaccttctttctctgcatcaacaacttgaagcggtggaattgattgagcgtatgctttctgatacaaagaaagatatcattagcaaaatcactccggcacgaaggaaagcaattgatgaaaatcgagatttacggtattcccgaatcgcttcataaatgttacggctgtattgaagctcggaaattacttgatgagcatggattagaatacgaattttattctgttctaaagccagcaaataacagtgtggggtttgattacgatcgaccccgcattgaagagttagcgaaacgtgttcgtagtcgaagcatggcatttacttaccctcggatctttgtagatggtaattttattggcggttatatgcaattgaaagagtatttgggtgaagcatgaataaagaatacattcgcaaagtagcaaacgctattcacgcaacaacgattgattttctggaagggtttgatcatattatccaccctgaaacgctggatagttgggaagccaaactgtttaaaagtatcaatgaacagtttccggaaaaggttaagcgctggtttatcagacaggaaatcgtagcaacgatccttaatgaacgtggtgttgaggcgttcggtgtaacccctctatataaacgaaaccagattacagacgaaacaatcaagaaatataaaaagatggttcggaagtaataaataatcagttaaatggccttcgggccattttttgtatataaatattggtattgaatacaatataggaaaaaagataatggtagctaaatcattccgcgcacgaagtggccttgatgctgctggtgaaaaagttatcaacgttgggaaggctgatcgtaatacgctgagtgacggcgttaacgttgactttttcaatgaatttaacggaatccagcagtatgacccgactcgtggttattctcaagacatggcgatcatttatgcgcgtcgtatctggtacgcaaaacagaatattgcttcccctgctggggctttcgacgaatccaaatggatcgcaactcgtaatgacccgaaatgggtttatagtaacgtaaccactccagacggtagcattattgaatctggtagttacattatggctgatggacgctttactgaacttctgtacctgctgccggacaacccgacagagggcgacgtaatcacgtttaaagattgtggtggtttagtaggtgtgaacagtatccttgttaagtctaacacccgtcagatccgtttacgtactgtacaatcggcacagtatcgactgacccacccgtacatgatcgcaacgtttatctataacggtaacgtatggcgtgttgctgaaactctggataaccgcgattctgagatcgtgaacgtaaccggaacaggttcattccagttacaatctggtatgacagttttccgtaacagtgctacgggtaaaatcactctccagttgccgaaatatgcaaatgatggtgatgtgatcacaacctatgacgctgataaaatgaactctatcaacgtagccgttttgcagatttatccaggtagtggacacactatttctgacggtgcaattactggtgttacttcggtaactagccagaaatctggctttggtatgttcatctttgatgcacagaatagccaatggaaagtatatgatgctgataatcgtgttcgtctgcgtcgtatctatagtgatttaaacacagttcctaacgattacgtttttgttactgcaaacccttctgggactataccaaacgttacagttacccttccaactgatgttgctgatggtgatcgcgtttacgtatccctttatatgatgggtaaaaaccagaactgtacaatcaaagttaaagatggtacaacggacaagatccgcaccaacaaaaatatgatgcagttcccgcagcgcaaagactatccgcctgatgattggtttagtgtaacttcattagcatttaatgctgctagtgattacctcccgtatatcgagttttcttacatgaaagctacgaaagaatgggttgttgctaattatcgtccgatcgttgaacgtgttgacgcaactaacagatcgcgtactggtgttattgctctggctgcacaggcagaagtaaacaaaaacttggaagacaacccgaacgacgaaactgctattactccgatgacgttagcaaataaaactgctacagaaacccgtcgtggtattgcacggttagcaacaactgctgaggttaacaaactttcaaccgatacctatctggatgatgtgattgttacccctaagaagctgaacgaaagaacagcaactgaaacccgtcgtggactggcagaaatcgcaactcaggcagaaaccaacggaagcaccgatgatattactattgtaaccccgaaaaagttgcataaccgtattgcatcgccgaccttgactggtatccttgcccttgttgctactggtggtgctcctaacaccaacacggatcgttctcaggctggtactggggtttatgaccattcagattatcagaaagcggtaacgcctaaaactcttcgtgagtataaagcgactcagttacaatctggtgttgtatggctggcttctgaaaccgaagttattaacggtactgttgcaagttcaaacgttccgaccgttgttactccggaaatgctgcacaagaaaacctctactgatggtcgtattggtttgatcgagattgctacccagacagaaaccaacgcagggactgattacacgcgagcggtaacgcctaaaacgcttaatgatcgtgctgcaacggaaacgctgacaggtatcattgcaattgcaaccactgccgaagtatcagcaggtactgtaacgaataaagcgatcgtaccgtctaaactgaaaggttatctggacgatacaagccatattactgttgctactgctgatgggttaactcaatctggtactatttggactacggttaacatcggtattcaatcagcaactgaaactcaacgtggtactttacgcgttgctacgcagtctgagacgaacgcagggacattagatacagtatttgtcacccctaagaagttacacgctaagaaagcgactgagagcgcagaaggtatcattcaggtggctacggctgctgaaactaccgctggcaccgttgcaaacaaggctgtttctcctaataacttgaaaaatacaattcaggttgatacttcatggcaagctaccgatctggtacgtggtactgtgaagctgtctaaggggcttggtacttggtctggtaatgatgtggctggttctactcttccggatgatggttatgccgctgtaggtgttgctgtttctccgtatgaactgaacttaacactgaaacactatctaccgatcggtgctaaagcggttgatgctgataagctggataatctggattcttcccagttcattcgtcgtgatattgatcagacggttaacggggcattgactctaacgaaagaaaccactgtacaggctaacattaactcaaccgccgacgcgagtttccgggtaatgaatgttagtggagatctgaacgttggtgatggctcatcgatgggtaaacttcgtttgaatggcggttcatctaacgactggtcaattcaagcaagttcatcctctgggcgtattgcaatgatctcaacgggtaacactggcacagttcatctttctgtgtataatgatactcgcggcgttgtagctaacgttaaattccaggctcctgaaattcaggcgattggcaaagtgactctgggtaatgatacagtgatcacggctgctggttctgttctctctatgggtacgaacaacaagacaactaagatcctaacttcggacgctggtaacattttggcagaagaatcagggaactcttataaagtctttactgagaagaacgcgcaaaccttgctgaatcctacgtatgtacgtaaagcaggtgatacgatgtctgggcgcttgacggtaagcaacagttcaattatcattgcaggtcaagaggcttggtcaacgctggatgcagtaacagaagcatccaggggcaactggacggctgagatcacagcatcggcacaatacaacttgcttcctggttatgcggttccggttcttgaaccagatccgattaatccagaaatcatgattgtgacccgttatacctatgttaaagcaccgggtactttaacgcagtttggtaacggaactgcattcacttatcagatttgggcacctcgtccgacctctggtactggtgttaatgcgctggcgcaatccttctggatccgtcaaatgaacccaattacgggtaaatttgatggttggggccgcatgtatactagcaacaacccgcctactgctggtgagattggtgcaacgtctgctgttggtactacggttaaaaacatgactgttaccgattggatcaaagttggtaatgttaagatttacccagatccggttactcagacagttaaatttgagtgggtggcataatgtcaaacttaatggcggggttcggccccgattttgtagaaacgcaaattctatcggaaacaaacagcgtaacttacagaataaccgcaaaggcaacacatcccaatgcggttcctaatcagtatgagtttacactaaatcaaaaggcggtagggacaccgcctagtgttgggatcaacgtatggagaattaacaatgctgtagttgatccaattaaaaccttcacattatcgaatgataattcagcaactgcaaacaaagcgtttgttgaatatatggatgctcaaccttctgggctgtatttgataatgactaacggtgaatacaaaacaagccaaatcgttgatgattggtttgctaaaaacagatccgttatgtggcaaggcgctgatttcgctcagagattcccaaattctgcatatgttgcattgtatggggcttcaaaatctcgtatactgattgaatcgttttacgcgaacgatggagttttaaaagaagattcacgcgcatcaatcgatcttgtctatgataacgttggtgatgttgggcgaactggtgtacctttccgatctgttgaagatacggaagaatacaattcaaccaatgggtctgaatataaagtatatcctgttgcaaacccagtgatctctaaactggctgattatggtatggctcctggattagctatgatgattgctggtgatttttacgccagcaaagcattattggatgctggatcaacaacaagggttactgttcgatggtttacgggtactgctcaaacttcatcatcggtgattgaagttcctgcaaataaacctgatgagtggttacgatttgaacagttctatacgatccctagtggttgtgatggatttaacgttgctgtatctcgttatcctaaacccgctacggatagtttatctgcgatccgtaactttgtgatggttcaggtatctgctgccgaagctgatcaaaactttgctgcacagtttggggttaacggtatcagaatgaacaacatgatcgatggcggaacaccgtatatatttgaattgcctaatactaaggtttatccaggtggtgattattctgcttccgaattccgtgaagttgatgcataaacaaaggcccggaacatcgggccttataaatatgtaaaaaggggttattatggcagatttaaaagctggttctacagtcgggggtttacctatttggcactccggcacatttccgctggttccggttggtaatactctaacctatcgcggatataaggtttatactgaaaacgataaaccgcaagcatcaaataacgacttcgtttctaaagcaagcggtggtcaatatttgggtgtagttgcctttaaacaggggctaaaaattaacgctactttcacaggcggaagtgaccagaacggtttatattctggtgatggtgatggcgcgacattatcaaaagccaacattgatcttgtatcatggtatggtattggtattcgttcatcttccggtactaatggtcgcgtattagtcatcaacgctcgaaatggtgatttaaacactcagggtaatattacggttgaaaagcaaatcagtattacaaccgctaaccctactgacgcaagtcatgcaacacgaaaaagttatgttgatggacagataaataatgtcacaacaaatgctaatagcagggtattacgcgctggcgatacaatgacagggctattaactgccccgcaattcgcgagcacaggcgcggcttcccgtcccgaacacgtaccacggctcgaccaggtaattactaaagggactatcatagattttggatcttattaaggtgaaacatggctgatttagaaaaaattcaattcctacgtagcacagttgcggggaaaacacctactacaagtcagcttgcagatggtgaactggcgatcaacatggctgattatgccatttacacgaaaaatggttcttcgatcgttcagttagcgggtaaaggtatcccagaaacaaataccaaaaaattaacagttgatgggcctagtgctcttaatgataccgttaccgtagcggaaggtaaaactattactttcaccaacgagaatttaagtggtgaaataactcgtcatatcgtcggtaaatgtgccagcaatgatggatggtacatcggttccggtggtacaagcaataacggcattcttgaaatcggtactattgacgatggtactgaaacaatccagtttgtacaacgcggtgctggtaacgtagaagccagaaaattagtcttacttgatagctctggtaatactactcttcctggggatttaagattatccactaataaaaccgttaaaattaacaacggaagctctcttgtccttgaaatgggtgtaggctctaacgatgcctatattaaaaaccaaagaggcgtaggtgttcttcaattaactaatgatagtaacctgacgttcagaaattcccaggtttattatgctatgagtggaagaggccctggtaaagatggtactcttctgactaatgtagaaaacgagcgccaacttaagcaagataatttccctatatctacaggcaccgaagctcggtggactaaagttgctcttttaaaagatcgtggatcaagccagagtcgcctgcaactgatggtgactaacggcggtaactatggttctacgcgtggatctatcgactttatcgattgtagcgctagaaactttccatccactttaacaagcgctaatattcgtaatcatctacaggttcgtcgaatcggtgatcctggaattgataacactaaccaaatgcgttatagtctggttcgtacctctgagggtttagaactgtggtttactcaacgcgcattcattagtagtgttaaagttgctctgctgtctattgctggtgatactgagtattatctgcctactggttacacaacttctgcaactgctccggaaggtttagttgagagtgtggctattcgtatctatgacgaaattaataaacctaaccttgacaatggtactgatggtattctgtctattgctaaaggtggtacaggcgcaagtacagcggatgctgctcgtacaaacttagggttgggtactgctgcaacccgcgatgtcggcgaaggtgctggtaatgttttagaaaatggcgcttatggcttaggcggtaatggtggtaaatccatcaacgacattatctctaatgcggatatgttgacccgcttaaaatcatacggcggtactttctggcgtggtgttgctaaatctggtgttagcgttcaaaatggtctttatagtcatggctctggtatttttatgaatgctggtgataccatgtcagccattaatatcgactatggtagtgctaaagttcgtgtatacgcggctaacaacgcggctcttgccgcaggagatgtcaaatacaacgaactttacggtacagcaaataaaccgtctaaggccgacgtagggcttggtaatctgacaaacgacattcaggttaaaaaagctggcgacaccatgactggtgatttagctgcacctaacctccatgcttctgggccgggaaccgcatcggtgtatgttaatgcaggaagcggaaatgctcatgtatggtttagaacaaacgccaatgaacgcggtgtaatttgggcaaatccaaatactacgaacttaggacaaattaacattcgtgcaaaaactactgaaggtgtttctgctggtgattttagcttccgttctgatggctgccttgatgttcctgtagcagttaaagttggtggagcagcaatactaaccaaagacgggaatattacctctggctcgatgtttggtggcaaccttaataactatctgaacaccattaaaaatgatatcactgctggcgataataagcaagtaagtaagactggtgacaccatgaccggtaacttaactattaacgctaacttaaaagtcgaaaaccctaatggatcaatggttgatttaggttcagagaactcagataagtacagcagattaacccttgctcgtaaagttggcgatggcgctgccgtagcaatgcttaaaattactcctgaaggatacgtgcaatttggttatcaaactgcggtttctaatccagctcctagtaaatatattctagttaaatctagcggccttgaggtagaaggggacttggtttttaaccagacatatcgtggtgctgaagacgcagttgatattactgataagactaatgaccttaacaacatggttattaaaggcagtgatttaggtactcgtctattatacaagtgtacttctactggtggtggttctaatatatcgaacaaacctacctctgacggcaactttgttcttgaagttctatctttgcgtaaaatttctgataccgattggacatgtaagcagacctttactacaaagaacggtgatgttgaaggcacatatgttcgatactgccaaaacggtacatggtctgcatggaaagaggttgttgctggtgttcaaccaattaatttaggtggtactggagcaacttctgtagctgctgctcgtaataacctcggtgttggtgaaggacagagcgttaagttcggcggattagttgttgatggaaacatcaacgttgcttctggtaattttgttattgcaggccaagctcctactgataactcgcatctgaccaacaagaaatatgttgatgataaggttgcttctgctattagtaatgctggcgacacgtatcttccgttagcaggtggtactgtaactgggcggttaacaattacaggcgatcagttaaagactacatcgctctgggttactggagatgctgctgttaacggtgttttaactgttgatggaagggctagatttaatcaagagttcattgtatcaacttcggttaacgtccagaacactggtaacagtcatttggtcttccgtaaagctgatggtacagaaaaaggacttatttgggctaatgaccctggtaacgttagtataagagcaggtggtggaagtggccctacttggaacttttgggaatcaggatcttgtcaattcccaggtgctattagtaactttaatggtgttaatagtattactaattaccctggcggcggtattggcgcgtatttaaatacagcgggcctaacaagtagatttagtaatggtgcttatgtttccttatacttccaagaatatgtaggaagctatcaccaagctattcttaatgttaacggctatgggcaagataacagcttttatttccgggctggtggtgatttcatatgtacccgtaatggttcattcgataacgtcgagattcgttctgaccgtagagccaaatcggatatcaaagttattgaaaatgctttggaaaaagtagaaaaactaaccggtaatacttatgagcttcacaacacatccggtggtactactcgttctgcgggtttaatcgcgcaggaagttcaagaagttcttccggaagcagttactcaggatattgaagcagacgggggtttattgcgtctgaattacaactcagtaattgcacttctcgttgaatctgttaaagagctttctgctgaggttaaagagcttaaatctcaactgaaataatgtaaggggcttcggccccttttaggagaaataactatggcagtaacagggccgtgggtcggaagttcggcaaaggctgaaactggcgaagcatggatggtgcaagctggggccaaattaagaatagggacaccgttttggatgtctaatatgattggacaaagcgtattccatttaattttcagaattaactatgcacaaggttcttctggcgatccatctagatatagaggattctttaaaagagggttatcagtaaatataggagactcagcaaaccagccaacattaaatgcatttcctggtggtgaagtagggtctttagtagccattacaaatattaaaggggatccttattgtttgtctattttaaatggggctgatcgacgagttaaagtgtctatatttaatgcatctggcggagaccagtatgatgtttatttcagtggaactactatgagtgacggttggagaagatatagatgcgaaaacgctggtggcctcaatgggtattttgaagctagaatgtataatcagttcggtgctttattagaatatgtttgatagataaaccaacaaactcacctcatactattaaatatattaaaaggctacctatatggtagcctttttgttgcatcctaaatatacctatagtaacctaagaagagtcttataaaatggctgagagaaatcccgtagataaactagccttatttgatctggtaatatcgtttgtgatgggtgtgaaaacatggaaacaattgctgataaaaataattctaataatggttatgtttcttatggtagtaacttggtacaaatggactgatatattcccgatgataaaaggtgccattgtagtcgatacaagggctatcgaaatggaaagaacagaaaagtttaatcaatccgcgttggaacagttgagcatagttcatcttacttccaacgcggatttttcggcggtactggcattcagaccaaagaacataaactattttgttgacattgtagaatatcagggaaaattaccatcccaaatcgatcctaaaaacctcggtggttatccgatcgataaaacatccgaagaatacacgaatcatataaatggcttgtactattcatcaactacagcaagttcctacctaccgacacgtgattttgtgccagtagcttatacttttagttgcccttatttcaatcttgataactactattctggatcggttttgatggaatggtatgcaaagcggcctgatataccagatatgaagataaacatcatatgtggacaggccgcgcgcattttaggtcgagcgaggtgattaacgtaatgctggtgttaaattgtgtgatcttccaatagcccgtttgattgctttaaagaagttcatcaccgggctatttttctcgtaaatatcccaaactttcaatttgtcccacggatccggaacataatcttcattccttgccgaaacccccaacgtaaccctcctgtatccagcgctgtcgtgataatacacgaagaatggcctacctattggcgcaaccttacaacctctcttagcggctctcatagcctcatcgaacgtcatggattcccccaaaaatttctatgcatgaatggtcgaattccgatagtttcactcaaaatgaatatcggatgatctagctcatcgtggttttcttcgtcaatgacgatatcccaatcagtagccttttgttcttctaccgtggcaatgaatacctggtttacttcacacttgcggtgtgtacgtctgatgattgtatccccctcacgaaacacaatcatatcaggattggtagtgcggtacgcggttttacccgcgcacacttcattaagcatatcttcgtatgtcattataaaacctttacacgttgaacgatggtttgtttaacgtctttgtattctccgtgctctttaacggttgctttgaaagtgatttcatcaccttcgtttgcaatgttattaccgaagtaaacaacaacattaccatcaacattaattttggtcatgaatctttctacagaagtgtagtaagaaacttgagtatatcccagtgaaatcactttctcaacggttccggtcatttccagacgttgtttgatttcaccgatgtggttagctttagaaatgcgttcctggcgctcttgttcccactgttcgcggatttcttcgcgtttggcgatataatccttttccagtgcaacacccatgcagtaagcgcacacagcatcgaatacagggctgtttttgttgtcttctttagactggtcagcccaccaaagaacagtaaacattggcatttctgcaattacttcgcctttacgcttgccaatcggcatgatccctttttccagcagttccagtttttcagtatcgaacactgacagtttaccgcgacgttcgaacagatcgaaatctgcaaagccctggaatatcattttgaaagtatcagtttcagttaaacgggctgaaacacggtcgaaatactcacgcgctttcgcttccgctttctccggatcggtagataagttgcagatatagttatcagaagtataaccgccgcctctacgctcaacacgcaaggtatacattgcatttttacgaccagaagaaatgaagtaagttgtagtaactacggttgcgttagtcatggtatttctccttaaaaggtatctcgtttcgatatggctaatatagcaaaagcccccgaccgaagtcaagggctttttaatcattcattcgaatctttcattgctttatgaagatgaatatcaaaaattttccagtacgcctttccgcgaggataaatttttgctttgtcaatatcgttgttgcttccccatgtattgtttgggccacgacagcgattttttatataatccgtatgccagaataagcgttgaaccgatgattccgtacctaatggatcttctttactgaacagaatttgtatactcataagaagaacccagtgcgaacaatcagatcgattttcttttctggttcaaacggtgatttgctatcgatgtcacactgatagaacataccaacatacttttcaggaatgttggattcacgcgcccatttcaggttatcatcggtattcggccccagcatgaggttaacaacatcaacagcataatcctgttctttggtgttgccggaaccgtttacataatgcccgtgggcggttttgaggatctcaattacttcgctatcgtcagtttcgactttgtaaagcgttgtattttcaggaatttcttcaagaatgatcaaagcggttttcatcacacttacctttgtgtttctgtttacgttttgcttctttaaatgctcgcttgcgatcgcggtgagtagaagcgcggttaatccatgcatgtttcgctaccaaattattcatataagccccttaaagaaaaatatttaggggctttcgcccctgtatcaatccagcagtttgcggatcttgtctgcgatacgtccggcacgggttgcgcttgcagtatgatcgctttcttttgaagccagttccgccagcttacgctgatgttcttcttctgctgcttggcgatctgctgcaacctgtgcaacctgctcattatcgtgagcaatacgcgcttccagttcagacagggttttgtcgaaagttgctacgatttcatctacagaacgaattttattaaacagtttcataatttatctcaattggttagttttaatcagtatacatcaatacggctggaattcaaaatcataaatgtcattcagtgcgcggttccactcggtgtagttttcaccagcaccataacgcatttgaatagcactttcgaacgttgatccgttgaggttcgggaaaccgaacaggtttttgattttgtcatgtgctacataatacagagaagcactttccagcatcgcaaccatcgcagacggttcgtgttcgcggcgcttgatacgtaacagagtacgactagcaccagttttacggcgttgatttggtgctacgtagaaacggaatactacgcgccctgttttatcatcaactaccaggtaaaacccgttttctttcagatccacgccttcgaatttcttgaaggttccgcgtttcatgtcaccaattttaattgcatatttgtgaatgtcaagtcttgtcagaattcttttcatattttttagataccagtttgcctaattttgtaatttcgcctgtttttacgttaacaaacaaggcgatgctcagaaatgggatgctaatcactacgctgatcaatgtaaacagaaaacgtatcacaaaaagaacagcacgttcaagatatcgttgcatccacgcgattcctaaacaactataccctactataaaggtggttgcaacataaaatgcaccaaatcctttacgaaatacgtaacctttcccggattctatccggtcgtcggcccacatttcacgggcagttttcagaatagattcaccactagcgcgagtttcgttagccgaaggcatgtttttaaatttcatgatagtctcctatgcgcccagaactctccaggcgcggttgtttag

SEQ ID NO: 59 - DNA, 76827 bp, unidentified
  source 1..76827: mol_type = genomic DNA
atgcataatggatgcagcccttgcacctctaataatgagatacagcaagcagtaaatgatgctcttgctcttgaaaaagagaacctagaacagtatgaaactaatgctgcacaaagtgctgatgatgctgcaaaggaagcagccaaagcagcagagtctgcgagtgcggcagcacagagccagacgaatgctgagacggctgctggtacagcagttgcagcatctaaagtagtcactgatactgctgtagttcttgaagagacggcagaatccattaagagtatgggtgaagatctgggaaaccagattgctagtatccagacccttcgctatcgcttggttattactgagcctacgacaactattgttttacctgaatctctgagcatttttaatgttcgtaccatagatatccagggtattactatggatgttgatgagcatttttcttttgataaggcgtcacgtacagttaccctgtttgatccaatcactgctgaagaaattgctgaagcagcttctgaaggtatttttgttgttgtcatttgtgatgtatataacacagatgatcctacgagtttccctttaacagttgccactgataaaggtgcaactttaattggtacagcaacagggaataccctacaggaagagttagatatctttactgctgatgcttttgcacagtggaaaagactgctggcagaggcagcttataacctggttcctggtagttttgaaactgggggtactctgacagactcttcagatgctctttgggacagggttaataaccaatgttatgtttgggcaggtacattacctaaaacagttcctgcaaactctacccctgcattatctggtggtatttcctccactggttggataagtgtagctaacaatactttgaaagccctgatcgccgctgccactggtagtaccttagttggttttctccagtcaggtacgggagctacagccacaactgtatggcgtaagtttagccgtattattgatgttgctgactttggtgcagttggtgatggtgtaactgatgatactcttgcagtacagcgagctattacagctgctggctggggtactgttaagtttgaagccaataaaacgtatatgacaggtaatctgtctactaccacaggggttacgttacagggccacagcaaaaggggtaatagccaaattaaagctatccctggtactacgggtaaccaccttacttgtagtgcagcgagtgcacctactattcgatatatagatttcaggggtgactggacttccccaggatcacgggcaaatcctactcctccagatgtacttggggcacttaatgggatctaccttacttcagcaagtcagtatgcaacttctatccaggtgttccattccagtatttcttactactctggttatggtatgtataccggctctgctaggaacatgggtagaatggaatacacttcctgtctctactgtgcactccagtgcttgtatattagcagtggtgctgactggatgattgaaggttgctcctttggtcgatcactggctgacgaagggatgtacattaactgttcatctttccgtatgtctaactctgaaagttatgaaaaccagggttcagggatcacattaggcccaactgccacagttactcgcattactggtaactggtttaacactaatggtaaaaatggttgttactataaaactcctggtggtacagaaggccacttcagtgatggtaacatcttctttgctaatggctgggcttctaaaactgctgatgaagttgctacaaacaactatgcgaatattcgtattgctggtgggatatctaactttaaagctagtaatatccactttaactatggatcgacttccacagaacgccgagtggcatactgtgtctatcgtgagaatagccagcttaactatattggcacaggggatgttgttaccactttcagtagcacagtgacttctgcttgctctgagattgggtatagtaacttcgatactgaagctactcgacaaactcagtcagggactgtacaggggtggagacatacctttaaacagtatgcttatacccctactactgtagttgcctcatatcagacttactataagtcttatgctggtttagaaatcaccccatctggtattaacattggtaacggtgatgctgctgcaacatcgtttgtaactggtgacggtactcggaatactctgtataaattgggtgcaccaagggttacttatgcagcactgacagccggtgcaaccatgtctgccactgctaccccttgggtgtattactctacacttactaccgatgctgtttttaacttaccagcgacactgggcctcaatgatggtacagttgttaagtttaaaaaatccattgcagcaccaacatatacctttgctcctactctgaattcagatggtactattgctactattctggggccagcaggtgtaggacagacttcagtagctgtcactgataccaaagagtatacgtttgtgtggaatgctgctaacaaccgttggatcatgtaagaggaattactatgtcattgacattaagcaaaactattgcagtaactaaaatctctactgtatatggtgtatctctgggtgaggacacagctgctgctgtgctggtttataatgtgaagtctgtaagcatcacagataacacgatcacagcagttgtgggcttatcccttaatggtgttaataccccaactgatacaagttacacactaccttatgatgctaatggtggtgatgttaccaagcaggtagaagcttacctgcttacgcaagatgcttttgcaggggctgttcaaagctgacttcaagagtaatacttaaaggggcttacgcccctttgtttttatagaaaaacaacatgagggttcacccatgagaagtaataacactccgttagggccagtgaataaaggcccaaacaaacatgccattgctcgtgtatttggtgttaaaaacactgaagtaacttatcttaaagaaggtgttgatcttcttgattttaaagttctttatgatcctgctactcagttatgcttctggaaaggtgatgctacaggtgtagtaaatacatggtcaatttccggggatattctcggaattaacacttcaaatggtgtttttagcttatctcaagctaaaggcggagactggttaaaaaccatgttagccgacgttactggtgcctccttggttaccatggcatcaggtaaaactgttgaaaatgtgttggctaatattgtagcagctcttgggtatgttacccctgagatgtttacaggaactgatacagagcagttacttgctgcgaataactatgcattaactaactctgttaacttcgttcttcaagcgaacaaaacgtatgccttaactggaaccactggtttaaacattgatctcgctaaaatgtcctttggggccatctttggcagagcacgaattgatgccacaggttttacaggtgatggggctatttggattcactcctcagctacgtaccctaatgtagggccaaaccataccaactctatgcgaggtgtggaaatctttggttccattgtttcgggccaggctggttgggttttaggtaataaaaattccgatgctaatggcacctacaatggtgactgccatgtctatgattgcgtggtacgtaattttgatattcgtattctgttcactaacagtacctggcgttataagttttattcgtgtggtatcacgaataccgcggtagggacatacactctttatgctccttctggcttatctgattcgggcgagtctatctcgtttattcaatgtaagttctacgacaacaagggtaacccaattctcgttgcactttcttactgtgctattagttttgtgggatcttcaattctgaatacccctatcagtgtcacaggtacaggtagccacttgtcactttctggaatgggtaatatggagaaccctaaccagcaatcgtggtacaggtatgtgtctgttacgggtgttggagctaaattcagttttaactctgccaccataatctgtaaccagccaacagcacagactaagccattattctatattggtacgaatgcctacatgcactttggggatgttcgtttaacaggtaacgcatacccattcgaaggtggggatgacttaatccgtagttggtgtgaaggcccaggctacattactgaatcaggatgtaccattgaccctacttctggggtgggggcaagaccactgcataagtctatttctcctatttataactttagttttgaaacaggtactactgctgggtggacagtgaatgcatcaggatctgctagtcagactgctgttgtaagtgctgattctgctaaagcaggtacttatggtgtacgtattacgtccatcagcacactgagttgtttccttactcagcgttttgtagttaccccaggacaaaccattactatgtctgcctgggctaagatattaacagcaggtgttaatggtaactctgcgggtgctataacagttacctactacacgaagagtggggaacaaatctcttcacaaggctctaatttaccttcagcagtaactgattgggcagtgtatgcgtccttcgttatgggtaaaattcctgtaggtgcagcagaagctgtagtgtccctgagtgctaaagaaggggctgttgtagactacgatgcaattcttattaacttgctggggtaaaccatggaatacactgttgaagttttttatcaaactgaagaggatactcttcctgttgttgaaacagtcactttggatacttcaagtattacaggtgataataaaaatgaagagattattaatctgatagcagatactcttcaaaaatcagacaagtacaaggataaagtagatttcactatccgagtacgtttgtaaaactaagccccttcgggggctttttactgaggattaactatgaaaatgtctaatgaaggtaaaaaagtaactaagtattttgaatccctaaagctccgtgcttaccctgatcccgctacaggcggtaagccatggactattggttacggccatacagggccagatgtttaccctggtttagcaatctcgcaaaccagagcagaacaactgcttgacctggatattgctaaagcagaggctgaagtaaacaaatatgggcataacttgacccagggtcagttcgactgccttgtggatatggtattcaatatgggatctggcttcatccgtccagataacatcaagggtgactttgatgactttgtagcatcaggtaacacggttgagatgcgcaaacgtattccacaattccgtatggctggtggtaaagtcatgaaaggtctggtacgtcgccgtgctgctaaccttgctctatgggatggtaagtccggtgatgaagcaattaaattaggggtagctgctgcatgaaacttgtagaaaactggaagtcagcatggaaatggtactctgtgcatattatggtagtgattgctgcacttcctgaaatttggggatacttcccacaggagttcagagattcattacctccccatgctcttgctggactgacaactttcctgggtatctcagctattgttgctcgtctggtttcccaggagaaacgtaatgatcaaggatctaattaaacagtatgctgttttattaggttctgtgctggccctggttttacttgccggggcttgttacttaacctatgttgtaactgataaccactggtctgctaagtattctggtttagaacagaagtatagtgatgcttctgccaaagctactcaggaggccagagtcaaagaatgggagtaccaaaacaatgttgatgcaatcgcacagcaaggggctaaagacctcgcacaagctcgctctgacgctgatagtgccaatgcttctattggtaggttgcagcaacggatcaaccgtttacttgccgacaccagctccgaagattccggcactacccaaagaggcaagacagccagagaagccctcgatctgcttgccaacgtgctcgaaaaatctctcgaacgaaacagacagttggctgactacgccgacaaagccagtagtgctggactcacctgtgaaaaagcctacgacgccatccaatcaggcaagtaatactaagttggtttatttcgtataaaccagtagaatgatgtacattaactagacttttcatgaagaggaaacacctatgtctaaagtcccctctatcggtgctggtgttatcactaccgatgatgtgctggcacaaggctatgatttcgtccccctgtttcagggtggtatggctaaagtgcctgctgatgtagctgcggcagtaaataaagatattactggtgctgcttacactaaaccgtcagctctgagcctgaccactgatctggcagctaccaaaactgttgttgaaggtgctgctctggaactcgcagtagttgctactggtggtgttgcaccgtatagcgttacctggtttaaaggtggctctgctattcagactctgggcagctctacccttaacctgggtgcagctactctggatatggctggctcttaccatgctgaagtctatgacgcagcgggtaaagagattcagtctactacctgcgtagtgactgtcactgaagctggtggttaatagctaccagcatgaataagcccccagttgggggcttttttattaccctgttaaacctaaaaggttatcaggatcctttaccgctgtgtctttgataaagacaaaaggcacaatgatcttcccgaaatggaaggcattagcactttctacaattttatttgctttgaaagtgagtgctccgttatttctgaaaaagatagttatttcagctggaattttgtctgtcatagagaggcaatcctgtgagttgcagccctgatacgattaatgcggttagtatgcactacctcatttctgtcataccctcgggcatttctacgaatggttgcgtactcagcttgtacagcaggattctgagcacgtttctggaggatcttggagcatttagaatgcacacgtttactacgttcgatcccacatattggacagatgttaaaggttgaactgatgatcatggtttcagaacagcaatgatatctttcactacttcccgtgattcagctttagctgagatactacgggttgcagttaatgggtgaatgtcaaaaccagctttggtatagagatcaattaagcgtggagcactgctattcgtaatgaccactcttgcacctctggctttaagctcaagagctttacctaccagacgtttctgatctccccacttgaagctggtgccactgtagcttgtgaacccctgatgtttaggcattggctcataaggtggatcacaaaatacaacattaccttcttgagcagtatccataaataacatgaagtctgtgtttgctactgttggtttcaaatcagaattgatgaaatctctgagttcctgttcagggaagtaaggttgttctttctggccccaaggaacattgaattcctttttcttgttgtaacggcacaggccattaaagccagtacgattgagcaccaggaagaacacagctttagacagggaattgaacttaccactgttaaagttagctctgagctgactgtagcgagcttctgagttacaccactcatgcagtttctttgcctggttcaacacataatcaccattatggatgagggctaagtagagctggcataaatcaggatttacatcattgatagccaccttatcgaaaccagcattcataaatactgatcctgcacccacaaaaggctcaacgagacgattaccaactaagaatggttggatttggggaagctggcgatacttaccacctgcccatttcaagaatggtttcatttgagtaccagtgctaacaggttcataacaagatcgtaggcttgataagccaaccaccagaaagcaatcaacaagatcgctatgatactccacacttttccgcgaaagctcataaaattcctatcctctttttgagtaaaatttcagtagttaaaggaactgataccaggactttgatgggtaattcaacgtcgccataggtatcccaggcatccccttcagtaagtgacacaattccttcaccttgctcatttagttcaattacctgatcaaaggcgcaaaaccaactatcccttggtgtttgaaatgtgactacctttttgttttcttcaataaattggtcattgaacattgtaaaagtatcatctacttctacttccacttccttttgttgaatcaggataatgatatctgtaatactagttagatccattgcagtaatctgcatgatcccctccaatgaaaaagccctccgaagagggcttgaggttacttaggtgaacctgtgtaggacgtcttgccttcaaacagcctctccacatactggaagattttaatccccagataggcagatgctgaagtgaatatgggttgcgtgatcccagtgggcaactgacttgccactacagggtaagcatcccatgccaaatagcctgcgagtagagctgctgacatttctgtagctgctgcaacgaaggttacctgaccatagcgtaggattcgtctcccaacggagattgcaccactgaccgtactaatcaggagagcacccagtagctgaacataaaagttctgttgctgatctggggtcatgacactactccaattcacttacatgaaatggattgtaacgttaatttactttgaatgctcagaattatctgaccataaactagcaaatttggcgttgatcgctttcatgaaccctttctggttatggttacgaagacgcagacgactaaagttaatctcatgaagacctttagtaatacctttaaggttctcaacaaagatagccttatcaggttcttcttgaaccagtgtgactttctggtttagaaagtacagctgaccattaagcaacgtccagaaaccagtgcattgatacacactctcagccactggagcacccataatcaactggcttgccagtgatgtgatgctttcagggcattcaaggtataaccctacttctggtttgaggtacttgagttcaatggaaagttttaccatggctcctctacgctaaacttgggaaccaggattgaacagacattaggcagatactttctgactttgttaatgacagatttgtcatcatcgatcaggaaaatttccactttgtccattgtagtcgaggcacccatacagaacattggaatcagcgacagcaatgcttccagtttgaagttagctgcactgccccccaggttttcacttcggttatggagtaagtcgaaggtaaggttaccctcttctttgaaacggtcgtttgtttctttatccagaaccttgctacggttagacaggctgaccaggaatgaatcctgattaaccagcgatttaaccatctcaatacctttatggtttaaaggctcgaacacccaggctttatgccagtccagccattcatgctggtttgagggatccttggggatatactgctttcggaactcactgttaccgttcagcacaccatccagatcacagaagatcagtctatgcatgtgatgcctctttttgttttagcttatccagtgctttagccacaaagggctttatatcatcttctgcgaggttgttaggcagggtgatagcattggcccagttggggtagtacaagtccagttcagctggtaaggggattcgtggatcggcaatttcaggtaaacctttccatgccatacactcaatcaggttgtcattaacaaacttgattacccttacgttgttacgcatcagcacataaatggcatcatgaatcagagccacaggcagaatgtcataacgaaactctgacgcccatactcgttccatgaactcattagcagcacggttggttaacagaccataggactggcctgagatagcattgcccaatgtacgtccctcagcttcagcttcacgtagcgtcttggtggtatccaggatcgaacgtgcaaggagcggggtacgaatacgcagcccaaaggcagcagtggcatagccatcgttacaggcttgtctgatacgttctttaacccattcaccagatacagcatagagagcatggaaactggcttcagtttctttggcttcctcttcagagaaaccacagttcttaaccagggtaatccaggtgccttgatactgaagtgcaaagcttggtgctttagacttattacggagtgggtagtatgggtgatccttctcagctatctggtttacagaagctggatcattaatgtcgatatccggcattaatttggcaccccagtagcccacagcacgtaatgagtgaccgtcgaagccatccgtaaacactttgaccttgttaggatcttgcgttaacagtgcattgatacggtcttccagagcattaaagtctgctccaccgaatacccaaccatcaggtgcagcaaagcacttcttgatgagtttaccgaaggtactcccagaaggtagctgctgtaggtttggatccgatgagcttaatcgccctgatactgtaccacccaggttgaagttaccatgtaggtaagatcttccattacctttgttaaaggcatttttgaaggtgggtataaaactggtgaggattttctcgccatctccaaactcacgaagagttttgagtactatttttccactttcagtagcatggttttccagcttcttaagtgttgcaccagccgtagatggttgcttggttttggttctgtctagtacaggaagtttcatcacttcataaagtaaagtgatcagatggttgccactattggggttgaacttaaggtgactgaaagcactgagagggtactgtttagtcttcagagtggcattcttagcttccattgccctggtttggataagcatttctgctttttgaaccagggggtgtgcatacaaagttttaaggcttcgatcatgcaattcctgtaattgcttctctgccttatccaccatagcagggatcataggcataccagtaagctcaatctgggtgattgtcttctggcttggcatcatcaggtatttatacagctcaagctgcatatcacgaaccataacagggtaatacttgttatagacgtaccaggtagacatggtatcgatgatgttatagcggagcagttcaggcagggggatcaccaggatattggtaatatcagacatagcccagttacctgcaaattcatgagcaagctgtttcaagctcagttcattctttgcagtattgttcaaagcgagataagcaatgatgcgagtatcatcacaatctcgatagagacaatccaggccacgcagtaaaccttcattatccaggggatctttcatccagaggttatagatcagaactttagtatcaaagttagccctgtggaatttcaggttacccttatattcctcaaagaacttacgcagcttaatacgaaagccttcgttaaaccaacggtagttttccccttcacttactgcaaggtcacaggtaaatgctataccgcctgtgttatcagggctgaaagcaatagtgccaataccagcagtaaagatatcaagactaaaagtttcgatatcacaggtcagcttagggtaggacattaacttggcaaatgcttcgtcaatttccttttcagtctggggatacaaggcccatttcaggatatcagcacccaaagctttatagctattggttaccttacctgctaaggcttgcacagacatttccagcttatctgcctggtttgggttatagagtagagcctgatagttaatacctaccagtatctcgatatcctcataccccggtattgaacaaggagtgccataaccgatcattgcatcgatcttggcattcttaaccagacacttaaagtaagtggagtcagcacagtaaatgtacttaatacccatcttcttaagctgagggagaattttagccagatagtccttacagaacttagctggtgctttgccattggattcatactccagcgaaaacgccagaatgttctctttggcatagccagcttcgactaaagggttaacgtagtgacgctcaatctgatcctgatagaaagcagactctttgatgagtattgctgtctcgaattcaggtttatgagcgaacattatatgacgcatagcctacctctctagtggcatacgaaagaagaggggccgaagcccctcggtactacttaagccaggttttcagttcatcactgactttcggatcaagtccgaatgctttcggccctttcttacgagaggacatgaagaactggagttcccctgctgcatctttggtgtcagcacggttacctttggctttagtctctttgaagacacgatacagctcttgtgcctgctctttgactgtcatagccttaccttctggtttagctggggattcagcttttgtttcgggagtagtgaccttgatatcactggcttcacgaatggacaggatcagctctgcatccccatcagagatgcccagtttagcccagcctttcttagctttctgtttggcagagattaattcctctgcaaacttctgagcagtagccagatcttcagccagataagcagcttcaaattgatcccaaaggaggtcaattttagtcttcttgatctcaggagcaacggctggagtaggctccttcagatcagcagccagcactggtgctgccttttcagtaggggctgcttctgacagatcagactgttccagcgtttccttaaccagatctacttttacttcttcagctttcgctgcttcagtattttcgactttggtgtaagtcacattactaccattgtgaccgcccacttcaaccagttcagtgatgcccacatgagcaccccgcagaactttgttcagcagctctttaccttctggaatagaagagatagagccaccactgttgacatggctacgcagactttcaggcagcacagcaaggatgtgataaccacacacacgcattttagtgtgactgtattctggtacagcaaatacgtcttcagggcgcactttagccatcacagtgacgttgccagagaagctgctgagataacccagggaagctacgtgcagaccgttagaacagtcctgacgacggttaggatcaaccagccccggacgcatgaacacgtaggaacctacgttctgcttgatattgcctgaatgtacatcgacaaaggtattacctttctgcttcagacgtttgtagataacgatacagccgtcatctgcaataggtaggtcaccatattcgatgaacttcatcaggtcttcagcagaatgcccacgatctttcaggacaggttccagacggttaatgaaattcacgaagccactgaaatccttcagcttgctcgctgctttcatctgagatgacagcttgtgagcgtgaggaatcacactacccgtctgagtattgactgccacaatagtgtcaggatcctcatccgtgattggtttgtgaaattcaggatcatcaacagtactgcctttgcctgcaagctcacgcatacgggctgtagccagttcgattttctgatcattggtgagttctactggtttggttacctcagccacaggggcttcaactactgcttctactgccacaggttgagcttccagagcataggtaaggtcatcagcttcttcaacatccagaatggtctggcctggtttgatacccagttccagtggagagatgtgagcaacactttcatccactttttcaggagattcagtgtcgatgaattttttgatgaaacttttggcaacacggaagaacttgataagtcctccagtgccttcttcagtttctttaaattcattgcgtaccttgacaggttctgcaatgtctacaaccgcagagccatccacagggatttgctttttggctgtttcgacgatgatcggcaaacgaggatcaccctgtgcaatggtcacagtactgccatcctctaaatagaggacagcattctgagcatcgacagagattcctacgatggtcacgagttttttcatgatttagttccgtttttgagtgcacttaaaacgatggttttcagagcagaagcccgctctgggtattgaatgagccactgaaggacacttccgtcaccatgcccaagggcacgtaacatagggtctttacgcagcactttcaatttcttgataaagggtaactcttccagtctaccccgcatgatggtttggataggatcccaattttcatctgcgttgagcttctcatactcttctggagtataagcataaacagccactgtagatggagtaagatcgagaatacgttcgaagtagggatcataccgtaacttttccaaaccaggcagtttaatgccgagtttagtacacagcttgatatcctgagatgagatacgatgctgagtagccaaggctttctggcgttctttcgtgacatactttgcaaatgctttgctcaataccacttgtttaacacgcggtataaagtaagcatccacgtcaatagcaccacgattttcagccatacgacgttcgataccattacggacaactaccccatcaaacaagtcttctggtgtagcatccttcagatgaagaaagcttccgagcatacccccatggatatcatcaatagagatgaaatacttagggttctggtttacctggcttggctctttacatgaagtaatttcacctttattaacccagttaccatttttcaggtaagcagagacagtacccagattattgcctggtttttcagctttaatcttcacttttctctcacgcttttcctttgcttcaaggatttcctgataggcaggatcccattctacacctggggtcagatccactacagtaaacccaagcttttccagttttgctgtgacagcagcaatctcaggagctttagctcgtggatccactttcagtgcccatgcagcattggaagttccctgaacataatccttatatgctgacttgcttgcagcaatacctttcaaccgggaagtgagaaacactacctgattttcaaggtaagttacgatctgagtacccgagaatgggatacgacgcataaagccatcgctatagacattacggccccaccaggtattttcctgggtactgaaacgtaagctcttaaccgagataaaatcagctccagcaatacctcgcataatacgtttgatggtatgtttgcgaaggaatgcatagatagcttcacgggttctgagcgtgccaaacgtagtagccttacgtaagtcccacagagcctggttagcatatagccattctggattagtaaactggtataactttttgaagccaacatgctcggcttctttgagttctttccagtacttcatacgaatagaggatcccaggttactaccaagatagcgtttaactacgttaggttggatttcctccagaatgttggcagtgctgccaatagcaggttgccccttggaaaacttgccttcacgcatacgtttgcaagtagcagcaatagaagaaggaatctgagcaatgatatccttctccatggttgcaacgagctgtacacacagatcggttaaaccatcttcagttaatttctggctggagagggcttcacgggctggggttaacgccagagtatcaggagctgcttgaaccagcagacgttgaataccaacgatttccataaactctgagagcatcccagtagctttgctggtggcttctgtaaacagcattggatagatgacagcaccgtaacgcacaaagattctgtggttacccatgtacttgttataccaaacttcgtcgtctgtgttccatgccccagcttcctgggacatacccagtttagtcataggctcaaattcgccacccatccaactgagttctgcattcatttcaccatgcataaccagatacttcagataggtacgtgctgtctgagcttgatccagagtcaaacggaagctgacagttaaaccagagcgagtggtaggaacgctaaccataggtgtaatacctggtttgccttggttctctactactgaacgggccatgttatagactgtcttggttccgttgtattcagaggttacacggaaggcatctacaagcgcccaaggggctttactacccagaccaaagccaccagtagtcttactgtcgttacgcttggtggaagcaccataggtgccatagatttgggcgatcttctctgggggaatgcccagaccattatcctgaatgatcagttcaccatcagtagtgatggagatcttcaggggttgatcggtagtaccagcttcgatgttagcatcccatgcgttgcacagtggctcacgaatagctgccagcagctggtttgaatacaggttagatgacagcatcatcagaaatgcagcatcctctaccatggatacagcgagagtttccccagcacccagagaggcagaggtagatttgttttgcatatccgcaacttgcatttgaatatcctcaagtaagatttactaagacttttaataagaaaaagccagaataaatctggcttatttgttaggcagcttggtttaaggcttcaataccttgtggtgtgaggtgccagccatacatttgattaaacttgataagaccagctttagctaaagcagtccctgtacggtttttattagaacgaggggcagtaccagacttagccatcttgaggaagacgacttgttgcttcgagagcggcatttcttttcctttcaaaacgtaggtttttgagtcctcccggatagctatcagctattcgtctggcaagacgatgggagatattaaagtgagcttcggcctgttccagcgtgtgatcaaagagataatccagtatttgaatcctggtttcatctctgatctctttacgcaattcagaaagtccaagcaccctgattgcagagtctattgagttaacagatctccccaaacagacagcaagtcttttaatgggcataccacgtaggtaattatcaatcaggaagcttttttcttctttagtccatggcctcttgattgatgaggccattagtcaggctctttaggcagtttgcctgccatagcttgtagggtaaatacagcagcatccgaagcttcttcgtcagttaccaactccgggtcaatataaccattgctaccttcttggttaatgcgaagttcactcaggttatctaaccaggtttgaatttcagctaaaccagcattgaccatctgttcagttggttcagtccagagtttttctagctgatcgatacgatccagcaagactgtgatcattgctggtgaagtgagttcacgccactgactgatagctgtaacacgctcatccagtttcatggtttgagtactcaatgcctgttcagctactggaagcagcttacggaggtcatgcataacatctttaactactggtttcatatgattgatcctttattaaccccaatgctttccatcgttttacgacgtttaaacattgcgattgcttctgcatgtttttcacggaattctacgacctgctctgaagataccgaagtgggtacatcattcgcactggttaccattgatctgatagtttcatgcatagcttcaggcagaaggacataaaagtcagatagactgccactattagctacaagatccctcagaaggtattcgtagtaattaccctcaagttcttccatttggcgtaattggtcataccgttcgtcaaaggcttcacataatgaggggtgtagttgaattacaggcacatcacccaacacagttgggtaattatcaccatttctggtgaagtacttagatcctgttaaaactatgtgcttaggcactatttcttcaactacccaaaccataaactctgttttggctttatcaaacatagactgtttgaaataccgacaaagaagatccatttcagtggtcttaattatcatggtatgtctccggtaagtactacctgcaaacgagcacgagaaatggctacgtagagcagtcgtcttaactgatcgatatcccgacaacggttgaggtcacctaagtccacatagacacgcctgaaggtagaaccttgggctttatggatagtgcatccgaacactggacgtaaatcgatccaggtacttttaaccttatccaaggcatttttgatcttagtgaactcttcaggattttctgcgaaaaccatttcctgaagctttttggagaaacgcctgagtagcttatctttagcctttttatcattgggcatgaaataagcttgaaccggctcacctgatttaaaatcttttgaacctttacggttacggtcggtataaacccagtgaccttcttcacccagctgtttacctggttctaaaccagtaaggtaaacgaggcggtctgtgccgatagcaggcaggacatttttgatgccacctacatagctgttacagatcgcatagtcaccttctctgagtatttgagaaccagtaacctgagaataaatcttatggtttacttcgttcacacgcttattggtaaaggccaggaatttgctggtggagtattcccattcatcacgggacatatccctgatcatccctgcttcgaacttactacgttctacccagatgatgttcttaccatccacattgcatggaggagtagggccaccttcaagtacccattgacgcagacgcttagatagtgcctgtacagggttatcgtcagcttgtcgcatgatctgggttagttcgatcatggggaagcggccttcttcgaatacaggcaagtcaccttcagcagtcttacattgggctttgtcgcccatgaagactactttggtgccattacccagcttcatatagatatgctctaacaaggtcatatcaatgtagctggcttcatctacgaagacataggtgccgaacagcagttccatgggtttatgggataccagtacatccttataggttactggatcttcttccatacccagtcgaagcaagctgtgaattgtcttggcagagcaacccatagcatgttcgaaagcttcagcagccttattggtggtagctgtaaattcgacacgaggattacgctgtactttaatccccagtgcttccattgtcttctgtactttttccagatggtcaagtacatacttaatgacggtggttttccctgtaccagcagcaccagataagaccattacctgattactgttgaataccatggggtcttcatccccctgaaatcgggggacgatgatgtcatgaggttgatgtttgttaagcagaaagtccgtgatgaattcacaggctttctgttggccttgggatagctgcataaatgctcctggttaagggggcttctatacaagcccttccattgtaaagtgaaccactttgccaaattttggtacaaagttcgggttatcataaacgaaccagattacaggacgtttaggatctaccagattgtgctggctgaggtaaccatcagtcaggatgaacatccccagtgatgctttatcacgggcgaagtcttcgatggtactgtcgatacaagtaccgccaccaccactgaatttaacattgagcagatcacgtactgtacagatccgagagatatccttgatatcagtatcaaactgatacagctttatctcatctggtttaaacagtttcagtacctgatagacaccacctaagaagatggtgaactctttcttgccaatggaaccagatacgtcaatagcccatgaaatacgtcccagggacttaccacgacgttctggagcagtgatatcgtgcaccagcatacgacgacgaagacgtgaccaggtacgaccaggcttacgtgtgaccttctcacagaagatcttcagatagtgctgccatggaattgggggattcaggagatcctcaatacggcgagccatatccttagtaccacgaccaaactgtttaccagtctggtttgcttcagccatttcagctgccatgttagcacccaataggatgctatcaatttgctgtttctggctttcctgttcttcttgagtcaggggctgtttattgaaatcaggcatagggttcttacccttatgagtgcctggtttcttagcctcttcctgttgaagaatccggtatacctgcatggtggtcatgccatcaaagcgggaatccaccaataccttaatagttgtaggcattggcatccccgactttttcagttccaggttgattacatagtcaccagcctggttccacagatcttcatccagatcgacagggaaagtagtgcagtgttcatgcacaatatgcccaacttcatgagccaccacaaaagggtgttcagcaggtttgagcatttccatgaatttctggttgtaatacacggttaaagaatccgtgtaagcagaatcacaagggtgcccagcgggcacttccttatgttttaatctgaggatcattgaagcccagaacacatacttctcatccaaagccagagtagtaaaggctttgtcgaggatcttctcaagtggtgacattgtaattccttagaaaagttcgtcagcgtgacgctcacaccatgcactcacctcgacgttaccaccgagtttagggttacgtgcaatgatgctacgcattgagatcacctggtaggacgctggcatacgctcaatgaaggtcattgctttagcaatgttatcttcagctacaccacgagccagtacaccagtcagtgcatacatccaggatggttcgttagtcgggatacgggcaccttcaggatctttgagaatctgttccatagttactactttggagaagtaagtaacgaaggtacggaaactacgaccagtagctacacctacagtgccgtcgatcatcggttcccagccttcaatagattccagcggggtgatgagtttagacagcatagaccaggtacgagcacacgcatgggtatactcgttggcatctgggttgaatttgttgaatgcatctggttcgtagttgaggaatgccacaatacgaggatccagggttgcagtgaacagcttcagccagtacttcaggttttctttgatagtcaggttgaccacacgagaacccagagcagtacccagagaggatgcaattgcaccatcgtcttcacggttaccagcagccatgatccacatacgtttgtgtacgtgtttctggcctactttcttgtccagaatgaacttgtagcttgcagctttggtgtcgtcagcagcagaggtcagttcgtccagcagtaccaggaaaccagcatactgcttgcctgttttagggttaactgggataggatcgccttccagggggatttcatccaaagggatatatttacccttggttttgtcatcgttgaagcccagtacgccattcatgtctactggttccataccagccagacgaaggtcgatcagcagcaggttgtaagtatcagctacttcctgcgcaatagaggatttaccgaagccaggagcaccatacagcataggtacaagaccctgcttcatgatgtgggctacggtgttagcagctttggaaatgtcgagcggagttgttagagtcgttgccatgttagatagtctctactttagatgcggtgaatttaatacggtcgcctaagctaccatcttgattgatcatgtaaccaatacccttgccaccttgggcaaggatcttgtttgatacagcagacattacctgagcagtaatgacttgaggatccatgatgggtacaccatcaaggatcacttgaacagtaatttctggggtagtgtcagtagtgacaccgattgctaatgcaacatcgaacatgtgaattccttagcaggagcaggagaagaagttaggtttattaacttcagtaaggtcacggttaagcaatacagacattgcttcccagaattcttcagaaggacgttcaccttccatagatgaaccacctaccagatagttccagcctgagggatcttccaggtttaccttacctgtatcaaagagatcatcagcagtaaattggtcatcatagtcagataactcacgggcgtactcttctaagtactcccacgctttacctaactcagtaccaatagctacatgggttttacgttcagcatcactgagatcatcccatgctttgggcactgctacttcatggctggtttcacgagagtcagggaaatcaggatgttcccaaacgtggcgaagagaagtgatctgacgaggcatcaccactaaccagaaacgttgaccgggaagtactttgctttccaggaacgggtctacaatgcccagagccttgataccgttacgcttggtagattggtatgccttaccgtctttgatgccaatgatggcacctacagccagttgttcacctgcttccactggttcaacacccagatggatagcatcacgtttttcatcgtgttggtggatcatgcccagagtttccagagcatcagtatggggagtacgtttgtcgttatgggacatgattaattccttaataggtttatgagtgacattcacaaacctggcttacatgaaaccaggtttaggaagttacttaacgggtacaaaaggtgtagcagcgcctggaatcattgtggtaggcaatacaccgttccacttgttgattgcttccagttccattacaccagggttttcacgcagcgcatcaccgcgtaatttgatggcatcagcttctgctttcgctttcagcaccacagcatccgcttcgccacgagcttgctcacgagccatgtttgcttcagcaatacgttgctgcacttcctgctcgcgttgcagtgtcttttgagtagcttcaactttagcgttaatagcacgcttgacgttatccgggtattcaggagcacctacccaggaaattgccataatgtcgataccgactggttccatctcttgtttcactgcattagctacgctgtccagcagacgagatttaccaccatcaataaacttgtcagtattgatgaggttaccctgacggttcaggatatccgcaatacgttgacgaaggtcttgatcggtaatttcatccacacctttacggtaggtctggaagatcgttacaactttggttggattaaccttatagctgatcgccagctggtgtccgatctgagtaccatcagacagctggaaataaaacttatcttcataagttttcatctgcttgaaggttgggaacgtgtacaggtcttcgttccagccgatccagtaacggcctacgcctttgacttcttgatcgacacccttctcgtcaccgagacggttaacgatgatacccacgttacctggttcgacacgctcatagcagcctgtcagcgaggtcattgcaacgactgccagaatgcagcccatgataaatttacgcatgtttgatcttctttttgatttgacgataaacgaaagtgaccaccagagcaggccacaccagagcaccagcaatgccgatgatcacgaggatggtatctttagctgataccaatgaaggcaatatgcctccatacaggacacctgacagaagtaagatcactactccatataggtatagtttcagatatttattcatctgttttgcgattccttaaaccagggattgtataggctttggagatgtattccccaatgtagaaatactcatgaatttcactttcgatcatgcgtacttcagagcctgcatcagtcagtactgtgtaacagggttctggtttaaagtcggcaatgctcgccaatgtgaatccgattttggtaatgaaagcattacctaatcgacggccatcttttgtgcatagctgacgatgtaattccagagtcccggagggatcgtagcgttcagcccattcaggaaggacttcacgtttaaactgctcgtcataatcttcgcttgtcatgaagcctcctttagggctttgtcacgccgcttacagttttctttctggcttaccatttccaaatgtgccgggttacagcacaagcgattacgacacttatggtctatctgcttcttggatgggatatagccgtagaagtgggtatatacaacgaggtgagtagctacagtttggctattgagactcatacgcccatagcctccaccacgtccagtccctgaatcagggccagtccatatgaagcaagggcttggtaagccttcaagtttaaagccaagatctttgatatctactcgttcaaatacacgggcaagaacttcctccctacggttgggaagttcctccagtatcttgtcgagcattgagcatctctttgatcagggtattgtggtagcacatgacagcagcatgtacttcgttaggggagcagccatacagactggctttagcacgattcattgcatcgtccagactgtcggctgtagggtagaggctattaactactggcttcatcttttccataatagcgtttttgcagttcgttcatccccacctgaagcagatacatcagatcttcatcttccaggtgttggacgtaggttaatgggttaatggaatcgactacttctttagccttttccagtgattttttagcagccagaatggcagcagtatcctgagctactttcaaatactctgtaggagtcagcttaggctttgctggtttaacttctgggttaccccagacattttcaccagaggccatgagggcatggatccgttcttccagcttgccgtagtccataggaggtacttgagggtacatataggcacgggaagccagaattgcagggttatgggacaactgacgtttagtaggtgacagatgcagggcagcatcaaattcaccgttctggtttgcagcacggagaataccccgtacagtttccagtttaaccccggatactgcggagatctgatgcatacagtagccttcgcgagccatagccagaagttcagcagagttgatagctgtcatttggattccttattttctaactttttcaataagcactcagcatcattaatgtcgagtactgcgttttttactttattagacaagtgagctaattccctgttgggaggattaaactcacaagccttttgaagaagctcatctttgtaagtagtgagtagcttcttcatcagagcaatttctgactttttcaaaaagtcccccacactttaggattgattaaatactgttcccagaccttatcgaaatagcagttgtctggggcatttttgaacataggagcaacatcgctgtcttttaagccagcaagaccacatcccacacgagtaaccatgaaattcagttcaccatgatcccgtgcataagccagaaaggtatccacgtattcatggatcacctgtccacgtagagtacgtaagccaggagacttagtaggcagggcatagctattgccatagtgaccatgacctttaccccatacagccccataaagctgtagggctgttttagcagcaccatcaccatggatacctgcttcattggatccgaatacgaataccattggtttgccttcaaggcagcgttgaatagtcacttcgactgtctccattggaagaatttcacggtgcggaggggatttataaatattaataccgtcttcccagtgcataccccatttaccttgccgccatagagttagtgtgtgtttagcacttttattagtctccagtagccgaggtgttcctctgaatcctggttcatgctttgtatatgagttgctttgatttatggatcggcattcaggaaggtaggcatggtctgctggattacggttgatccaccatgtcttcattactggtttccttattcaggttgtattgattgatgaattcacgacgaagttcttgcagacgagctacctcagcttctgctttatcgatagcttcgtcgaagtctttcatcgtttcattgattttgtctttatccattgtacatacagctccagataagggcacagatgaacgctgagattccccagaacccgtgccacatttgttgacggtgaagttttgcctcataaccgcagaggcgtagatgtgctttaactgtctgggtagcttcgtactcgtactcagctttttccagttcagcttttgagatccttaccaggtgtgtccaccatataaagttgatacagcaaatggctaaagcaattaatacatagatcataagagcctctttaggacataggttaagactgtcttaaaccccgttagcctatagtttactttagtcaaaatggggatttttagtaaatttataatacaggttgaaagcgtactagtagtactaagaagtactactggaacactctgaactactgatcttaaggtatgaaaaagcccactacattgagtgggccatttcgagtatgccttgttttgtcgctatctacacatccctcgaatgtgcgctggtcgagtcttcagactcactagcaggatcgccgttacgggcgtttgaacgagtaacgagactgtctctgatacaaggcggtacagaaacagtagcgacaagataaaccacatgaattgcttcatagttcctcctgcctaggtgattaacactatgtgaatcacactggtttgtaaagatacaaagcactgtaatccaatgaaaatgtggggagactagctcccctgccaaaggcatagataagaattaagtgatggtaatgagtcgagcgactcacagaagtgaccggaggtcacaaaggcttaagcccacttcagcatatacttatggaagttttctacagtgagtgcacataaaataatatgtgctgcacctattccgcctttctgctctttaagaaactcaatatgttttgagatgtcagttagggcttgaacaccactaccatctactgtgcctttggttgggtagtacatgagcttaccagcccagaatactgatttaactgctacatgcccttgagtaggcacttctgctgtaaaaccagggaatttattaatgaaatctgctgcttcaggtgcgttcataggatcctctttaccgttgacggaaacactcgcaaagatgcccggagggcatcaaagcttagtattttcgctatatattttattgaagaagttaaaagcatcagctatgtcagacgtacttttaggttcctgtatagaccgatcatcgataaattgtttagggttgtttatttcctgtcttctaagcacttcctctatcatcttacgttgaaagtcgcgcatagaggcatagccaggttgctcgtcattgcctggtttccaatagatccaacctaatggggcagattctaagtccattacaattcctgggatggaatttttatgtatgacttcaaattgcccctctactgctgcaatgacagtaactggtttcagctccagctcttgtatgcctatggcattagctgttttgattctgttaacagtgccttttggcaccatgtattttatcgtgtccatattgcattccactgtttaaatgctactgtttcgcccatgatcacttggtacttttgcaaagtttcccatgtagcaaattctttgggtaaatcctcttcgttgtaggatcctaactcacaaccaataggtaagactatttcagcctctgtgagtcctacagcacttctggttttaaccagtctatacagagcaactggtatcaccacttgtgggtacacataccctgttacggccatttagcctcccatatgatcatgttggttttcaggcttctgtgggcactacagtgggttcctggaggtacaccttggggtaatgtaggattcattggatcatcatagcgaatttccaatcgtgcctctttaagcccaatagctgctctggttttgattaacttaatcagctccagtggtacataacgagcactaggggtgttgtaagtagccatagtattccttaaaaaaataaacctaccccgaagggtaggcgtttggttagcttaatgcatagttggaaccacggattttatccccgaggttgttagacagcttggtatacacaccgtcagtggtttgatacagctggttcatcagggattgcagaatagtgctatcagcgaattctgccagcatctctttgtaccagtatcgtacttcgttacagttgtttggatgtgaaccaaaggcatcatgaacagtagccacagggaatggtttgtaggtcaacatgaagttaactttacgcattacatcacgagctaagtcgataggtaactgcatgtagttgctccagttgatatcattgagaataaccatagaagactgcttattctcattccacagacggatacgacgtaccatatcaccagtagcttcttcagcctgcatacccatgctattagccagcagacgagcttccagcatcttcaggacttcagccaccagctctgggttatagttgcacagacgctccagctcacgcagtaaataggcatcacagcagtggatggtattggctacgttagcacggcctttctctgtaccccggttctctttgtattccatggtgaaagtagcgtgatcaagctcatctacttcaattctggtttccagagtttccatgactttcatcttagcgatgaagccatcaggcagctccagaacgtgttccagagcataaggacgccatgaacccaggagttcatccatgaggttgaacgcaccaggagcgatgatgtgggctgcttcgtagaagtagtccagcatctcgccctcaccgaataccttcttaggcacagccttagaaccgtaaccagaggtcattacagcttgtttgatatggctacgaggtacttggatactatccagacctttacgcttcagaacgccattcatggcctctgtggtgttgctgtaggcatccatacgcttctctgggtcaatacaaccagtgttatatgcacccttctcacagcctgtgagggcactcataatctgaatgccagagcagcagccatcccagtaggtgatgttacctacagcttctccacgctgtacacgacgtaaggtcattacagctttatggtacagttcaggtgtttcagcatcctgaaccttgctttccagatccttgatgttgtcatacacccactgaatacgttcttcgaacagtttcttgtccagtccgtaatagttggctacgtcgatgcacatgtattcccaaccagacatatatttgaagtttgggccataagcagtgttgattaccattagttaagtctctctatttaaagtttaaattcatcaggcacaccagttacttgctctttattggcaaagtttaaactggctttcttgaagggagtgccttgaaggttgatgtgataaccctgggtgtacagacgtccacgtttgtcaggtttattgccaaagtagaacttattaccctggtttaccatcaggctatagaagtagtacgactgacgtttataacgcatccagttgtctttctgtttacgtaccagatcagccttctcccacggtgtgagaggtttcttacggtgcttctggagcttctcctcatcgatctcattgagatcaaatgtaggttcttcctcgtagttacagaggaattctacgtccagagagtaaggcacagcattacggctgttgattacatccagacagatatcctcgttatggtgattgaatgatccccctagaataaggctatcagatgaataagtaaggtaaggagtatccatgttatgggtaagcttcttgggtgggcaaaccagtggtggtagataacacgaacgctcaatgaattgagccagctggtcaggcaacccaatattgctaacgatatacagagatgctttaggatgaggcttgttaatgtcatatacgtcagtatccgtgaggacagcaacgatttcagccatagtctgaatgctgtcacgtttatcgtcgaaacccagtctggaagccagctggcctactacgttgaccattggagtaggttcagggaagtacatgattcccacgaacacttctttcacaatagcttccagatcaagggatttgaggtggttaaggcgtacagctttagagtcataatactgaccttcaagccactggtttaacagagatacaccctgttctaccttgtctaacaggttgcaatcagggtcttcaaacagctctttacgaatataaccatcaatatgtttcttgttgaactgacgttcgttgatggcctgaagttcctcaactggtaaccatttatgttgcattacaatcttccccatgtttgatagtcagcttctgtcatgtggtcatccacttcttctctggctttagccacttcagcattctcagctgcacgagtcctgttaggatcagtatcctcaatgaggtgtttatgttcagtacatgcatagtgcttgtaggtatctcgcataccaaatctgggagcatatttgctcatccagttagctacacgtttaacaccattagctttgcaaaacttacagtaagtatgtaattttgctggtttaagttcagtagccattatagattcctcgtattagacgtaattgccattcacagccaggttcatcgatcctgtcagctattattcttggtttaaatctggataccccttcagggtagtgagcagtattaagcctgtactcactgttggttttatacttacccaacactcccggaagccttagtaaaggttccttaatacccagcatatattgggtacgtaactgcttaatccacgactcttcaaggacgatatatacatgcccatcaaagccagaagtaatgctcttgcctacaagggcttcccatgaatcattcaagatagaactcctcaatgaaatagcccagcacgaggctgggcatatggattacagttcgaagttttccagtgctttggcatcaccaaaggtgattaccagacgctcacccagggcttctacgccctgtgcacgcaggaactccagcactgcaccttcaaccggatggtcttcacgcagagcgatgccacggccaccctggcccagacgacgaacctgaccatcacggcctttgacgccgatgttcagatagccaccaacgttacgctcagcaggagcagcagcgttgttagcagaggaattggaagtgttgtttgcagcagtgtttttctgataagccatgataaatacctcgatagttaatatgaaatgaagaacgaacaggcaggattgcctttgcattcattgccctgtgggcaatgtcttaaataagaaagatggaagcaaggacagcttcatattcggcatattctgccggatcagtgttaatgagagcttcgtactcacgcagagtatcaacgcagtcttcagtgagttcttcagctataatattaagtgcttcagcctcacctaaatgagcacacagataacttacagcacgcataaatagcttcagtgctaactcaaccatgccaccttcataagccagttggcattgttccagagtaatatttacatcgatcatgagaatgagatccgttgttcaaggatgacaggaactccaatggctactttagccatcagagatttaatttcacgcatatccactttgatagtgaagttctttttatgcatacccattaatgtagctgggaagtccaccactgcaatacgtgggaacttctccagtgctacattgaatttagtaatagtgatagtggcattgatgccaatgttgaagtcactataataagatatagtaccttcacccagcatcttagaatgccagttaaatacttggttagaagtagtcattgtccagtctctccagacatagatactgacctttgcttataatagcgtactcagtatcattgagaattagatagtcttgagtccccagatttctgctaccatcacgcatcttgtttagtagtcttatgtcctctggtttaataccaatggctagtttagtttgaatagttttagcttcagcttcatctaccctaaccatcattgagggatgaatatccccaaatacagcatagtagctcatattacccccatactgatattaaccagtcatactcctcctgggttaatacaggtttatattgctcaattacattgagtgcattgttgaagttctcattacagaagaatgagatgattgcaaagtatttcaccagtctatctccttaaggtagaagccttcatcatctttataaagacgaaagtctttattactaataaagactcttgtagcaacaattaccttttcgcccattttaatacgtactttggatacgtgaacccttggttcaacaataccaatactacgttgcactttaactttcttaagttcattatctgatattgaatagataaatggttgtttacctacattttcttcccaaaaacgtctatcatttttggtagagctactaagttctattaacataattacaccttgggtaattgttgcatacttgtaggaggcgaagaccaacgaccactgactacacctgtgagtctttctttgggtacatacttcttaaattcccacttacagtgtttattaaggaatacttcataccctttaaacagttcgtcagtatcattacgatcactggcaatgtttctctggttcttacgtttaatacgtgaaccatcgatacagtacccatcaagagtacagccaatggctaaagccatctttacctttttcaaccatgcatcagttgtacgaatatgaatacacttctgcatagctggtgcatagacatagattattttactcatagtaatgttcccatagtaaatagaggattaagataaaaccagatatgtaagcgagtaataacatattcatttattgtcctgtggacaatatacctcccaatctgtatgtttttgagttagaaagttttctactgtatctgtataggtatccccattagagaatctaacaaatatttctcctctttggttcagtgttagtagtgttccactattccatagaggtctacgtattacagcccctagtttcagcattaataatgcttctttagaagtcatacaatgtaccaattgtgagagtcatcgaatataattgtgaatttactcactggagtaaatatcctggaattattatcactacagtaaatatagtctcctttgatgtagtaataaagatcttgtttcatccagtcagctctgattttacatccgatcttcattgctaacagggcttcctgagtcgtcatacaatttccactccataccttcgtattcttcgataaacttattaacattacatactagattactgaaacttaaagtggtacatacataacgaatagagctatcctgtatttcataataagcatcaaagtcctcccatttagtgggaacaaccttgcaacctattttcattgcaagtagtgcttcagctgttgtcattgaataactcccaaccgtctatgtcaccatagcaaggtatatagtcttcgagttccagatgaggagtaccatcctcattgatagtaagattatcaatggggtcatattctacccattcacctggattccatgagtcccttcgtactttgcatcctagtttaagggctagtattgcttccttggttttcatgatatatctcccaataccctataccagcaggtattaagtgttccaaactatctaaaggtataaatgggctttgacgctcactaaatagtgtagagcctactaaatagatataagcacctggcccccagcggctatgacggattttacatcctatagctaatgctgttttaagttcctttactgttgtcagattactcatcccctgtctccagtagatcgattcacaagagtgttcggagaacacgttaataaactaagccctccagtgagggctattgtttagtaggtatattcaatacgtttccaatgctcaaggttgagcacaccaccatctttgatatgtttgagcatagtaagcagtaatgaatacagcttatccttctcacctttaatctctgatttaacgtgatagaactcttcacccatgatggttatttcaatacgattgacataccactgatggcctaaatgatcttgaatcagtctacgagtgatatgtggatatgatgcttctttgatagctttacggtgtagctctaattcaagatccatagttatacctctggtttaatagcagaaccaggcaccacatgatttacatacggcaccaccaccatgacctgatccaacattaagatgaatgcaatcagcatcaccctgccataggtcatgattctttttatatgtttcaataatgtcagagaatccacttacgtagttctctttatcatcagtaagatctacatactgaaacatatcttcaccaataccctgtatccactcaatagcctgagctacagtttcaaactctttatagttctcgaaagtatcaattaactgatagttgatagttaccatgattacacctctggtttaatgggttgggattactaaagtattatgaccagcaaagctgactttattactatctttgatgagcacacagttatggttatcaccatcttctgtagctttctgccatacattacggtcaccatatgcccatgtctgggcaaacatgaactgagcaccatcttctaattcgtcgaatttaagtacttgcatggtttaatcctctaagtcagatacgatttcttcaacttggcttaatgttaattccagctcacaccagatttcacaggcatccatgcctgatttcatcatggattctatgtaggctcttaaagcactagcatagttagcacgggcttcatcattcatgatgacctcacacacatttacggtaggcagacacaaggagtcctattaacagggctatgctgatataaccattagcaccatgatagagtgctgcttggataactactgttgcagcgaaaacgtgcagtgcgaagataaatgacttggacatagttagtactccaataggttaactgaatacttctatacattaccctgtgggtaataccactaatgttattgtggttataggtacacatgtttctatagagtataggtgtgattaggtatgaggtaggtggatgatgaggtatagggagagtatagagaagatactaaagtaactgtacgtagtaatttgacactcaattccctctatttcctgtatagggatgatgagtgattaggttatcggagtgccccagcaaccgggagcacggagataactggtgattctacatagaatagatctatagctatgtgatgactggagtgggttaagtaagggattgtgttaagggattgagtgagatagtaacactgtgtcaagtggtttgtcttagaacatttagttataagcatattccagatgtgcatatagatttatctggactggcttatcagtaacttatctgtatacaggaagtagtacagagttagtctgacatacgccagagagtaagtttgccacaagttttgaaacggaggagcgcacctgtactgtcatgtagcacagtgtgtattgtgtatgatgtgtattgtgtatgaattaaatagctcacccgaaggtgagcttagttttacttctcgtcgttcagtgatacaccaagtgcagccagctgattctccagctgcttcttagtgctgatgtattcagctttatccttcagctctaccatctcactgaagcgcttggctttgttatctgctacttcagccagacgtttaccagctgatgcaagcagaccagcagtatcaatggtatcagtgacagccttggttgctgagtcgtacactgcgcgaatacccatggtttaattcctcttagctaagttatgaatgcatcattgcatccaatcaatgagcgtgctcagagatgtgtaagaggaatggtaatggacatgagtaagaattcttttttagcgttcagctccgggggtagattcccctctgtgtatgagccaggtagtaagtactacactcatacccaaattagcgaaaattctatatagcgtgaaagcgtatcaattataggtgaaatagcacttttactattgcacctgctactatccctactacagctacgcctataacatcccctataaagctgggtaaaaggtagctaaaactgtagtacttaaggcagttaaaccagtagaaacctaacagcagagatgtagcaactatgtagataattatgaagattttcattttctgtacccaaattagaaaaaattcccctatgcaaaagttgaaagcgaatgcacctatatcttgcttatgttttaactctcatatataaaatatataaatttcactataggcgggtaaggttatgcaaccacatgagcagcgagtcgttgatgaacagtcagagttagaaggtaaactccataagttaagtgagtttaccaagaccagtacttttgagcttctggctacggaagagaagactctgttgcgtatgcagcttgaagtaatgcgtacttacagttctattcttggtttacgcattgccaacttcaagtaagacaagaggggcttaacgcccctttgttttaattaaaagtaaatgtattcaatgagcataggcacagtaacagtgtctgtctgccctgggtagttacctgctttaagtttcacagtttcataaacagacgtcacactgatatccgctaacacatagtgaataccctttagtttcttattcttatctggtgggttattaccatcgatctgactcatggtaataatgttagacatagctttagctatgagttcttgggtaaaagcaagggtgccatcatgtgagcaagaggcagtaagcttaacagcattgggatcatcgaccactttggggtcatatttcatatgagggatagtgtcaatatccactttgtccccatagtttttaagcatccagtcacggacaggtactacagttgtgatctttttcattttaaattcctagtatgttaaggcggggatggtttacctaagttaacctatagattaaactccagatattaactggaggtgcttatgtcaaagattacgctagaagagtttaagaatgcattgccgagtaacctgggtaagaatgccagtgttaagctggtggataagattaacgatatcctgaataatgaccctggttttgcagagcagtatgcacacaatctctttcagtacaccaatgtactgtctaatggtaaatacaaactcagtaactatgtggaagctgtgcagtttgtaagttacctgtctatgggtatgtcaaaccaggatgcctggattaagactttccctgatcgctataaatattatctgagtaaaggactgtcttcgaaggaggtcagtgcttatgtcagtatgtactctaactctaaactggtatccagccttaaagaggtagcgtatattcctgttcatattatgtacaggcatgtattccatgatgctgtgatgcatcaggcattgctcatgaagactgccaccagcgagaaggtacagagtgatgcagctactgcattgatgaactatctgcggcctcctgaagctaagaaggtggagctggatgtttctgtgaagcaggataccaccctaaccgagctgagacaggttatggaaggtttgagccgtgaacagcaacaagtcatcgccagtggtatgagaacagccaaggagattgctgagggccgtattatcgaaggtgaggtaatcggcgatgatgattgaccaatggtatgcctggttatttctaacatacctcatgtgctggatagcagtgattatattgccacgtaagaagcgcccagcactgggagaggagaaaggatatgagtaatatttttgacgttgaacagccaaagaaaacggtaatagattggctaaacggggtgtcttatgcagaagatcctacgtataagccgagtctgtttgctttgcagttcgttaactttatcaagctggtcaatggtggtcagggcgaggagcataagactccggtgcttcattacaaaatgctggacactgttgtatcgggtgatcggcgtattgctaatatggtacaccgtggtgctgctaaaactactgtgatggctgagtacctgttcttgtacttgggtgtgtttggtagtctgcccgagtttggtcgtattgagttggccctgtatgtttctgactccgtggataacggtgtaaagaacatgcgtaagaacttagaattccgttgggaaaactcagactttctgaagcgaatgatccctaaagccaagtttacggatattcgttgggagtttaccaacctggaagggcaaaccacagtaatcaaaggctatggtgctaagacgggcgtccgtggtacgaaagagatgggtaaacgtcctaagctggcgatccttgatgacctggtatcggatgaagatgcacgttcccctaccatcattgctgctatcgaagatacagtatacaaggcagtagagtacgcattgcacccatccaacaacatgatgatctggtctggtactccctttaacgcgggtgatccactgtataaagcagttgagtccggggcatggactgtcaacgtctacccggtgtgcgagaggttcccctgtgaggaatcagagttcaggggtagctggcctgaccgttttgattatcgttatgtcaaacagcagtatgagaaggcattactgggtggcaagattgccatgttcaaccaggaactgatgcttaagatcatgtcagatgaagatcgcctgatcgctgatggggatattcgttactactcgcgtgctgccctgttgaagaacaagagcaactacaacttctacatcaccactgactttgctaccagtgacaagcagtctgctgacttctctgttatctctgtgtgggcactgaacaataacggtgactggttctacgtggatggtatctgcgaacgtcaacacatgggacagaacatcagagaattgttccgtctggtttctcagtacaatccacaggaagttggtattgaagttactggtcagcaatctggttttattccatggattattgaacagcagatcgataagaacgtattctttaatctggcttccagtaataactcaagccagccgggtattcgccctaccactgataagctgcaacgctttaacgtagtggtgccctggtttaaagctgggaagatgtacttcccttcagaactgagaaccagtaaggcaatgattgagatgatggaagaacttcgtcttgcatccttgggtggcttcaaatccaaacatgatgatgcgatcgataccatttctcagttggcactgttgaaaacctttaagccaggaacagctgcgcctgtatactacaacgaagagaaagacgtgtggtttgagccagacgttgaagtagatactcgactcagtagctatctggtttaaggatcctgtatgaaactgaaattatcagatgtgttagagaacttggcagcgggtgagttatctcacctctccttgtttgagaatggggcggatatcccatttgaaacttttaataaacgactgttgcccattatcaatgctggtttaactgatatccatatgcgtttctttgtgaaacagaaagagatatggctcaagcattgttgtggggatactaagctggtactggatagaaagaatgcagtgtctgcccacaagcttcgtggcaatgctttcattcaggactgcgatgatccctttaaggatgatgtggtagagatcctctctatctataaccaggacggacaacaatacccgctgaacatggacacagaccacacccagccgagaggctgtgggtgtggacgtggacatgaatgcaactgtacaccaccaaactcatgggcacgatatgacagcaccctggactacccggcaaccatcaccaccagaaccccctatggcagctatggtagttgtgggcctggcttgcctgtgctgtatactcctgctgttaatgtgatcagactgcctgagaatatgccttctggtttcatgaaggtattctataaagctgcacctgcccgtatccctaagctggaggataatggggtaactacttatgatcgtatcgatctggatttaccctttacttatctggatgcactggtttactacatctcatctcgactgactgcacctaccaatggtggactacagacagggactaatgagactactcagtactacaataagtatctgtctgcttgtgcagtgcttactgatcaaggggtggatgtatctactcagggatctggttacagcaggtttgctaagtcagacttcaggtaaaaataaagccccttaaccggggcttttctttactccagggagtcagcagagtactcaaggaaccaggacttacaggttcgttttgtgaacactgtattatttacatcagggaatgccatggcataaagctgtttttcaatgtcaatgagctgatcatcagtaacatctgagttacggggaagattatgcttgatgtagcttgatacaatagtacccccaggttcaatacagaactgtaaagtggaaatcccattgcctttacgtaaagcttctacaatacgtttaccagacagggcagaggtacgtgtatcttcaaactcatggctgagtaacagatctactttttggagcatatgatccatatcatcagactgcgctaacacatgctgtgcagcattcaaaatagtattgaggatagggccatcaggcatgtcgattaatttcatttctggttttcctcgaacattttctgcttcaggagataaccttctttctcccagatcttttcgaaggcattatcataggcttccttccgaccaatagcttcattgtaacgggaaggatccacacaggcagaagtgccttcaaccttgaaaccattctccatgatgatgatacagatggttaccagattgagttctgcgagatcacgatcagtgtatccgccattgctggttttaatggcttcaccagcattgatgaagtacacaccacggatcttggcttcgatactggatttacttacggtagtcataaggattcctcagataaagaaaagcccctccgaagaggggcatcctaagcattttacgtctgctagacgaggctggcggatatactcagagccactgactgcttcagcaagcatgggttgatagcccggcaacatagagttatccaacggtcttccggtagcgagtcggaagttggttgaagtgggagtcctagtcctgtatgggatcacttctgatacattggcagctatcgcgcgattcgcacttccgatcagaagacttaccattacacttcaatttggccggagcatctggattcgaaccagagaatgtcggtatcaaagaccgatgccttaacctacttggctatgctccaatttggtgagagtgtcccctgtctcgtaggggcactaacgtatcagacttacactgacactactctcattatttggtggaaggtgaaggattcgaaccttcgggcgcatctctgcacctcctgatttcaagtcaggtacaatcggcctctctgacaaccttcctaaatttggtgggggaagatggagttgaaccacccgagcttcttaggcaacagatttacagtctgtcccgctacctctacggtctattcccccgaatttggtcaccacattaggattcgaacctaagacaccctgctcccaaagcaggtgctctaccagactgagctatgcagtgttattaggtgaagggttgcctgtgtcaccaggctggctgttctgtccacttaaggcttgcagcaggaacaccatggcttctcaccattgatcctctcacgactgagacacccttcataatttggcggtactaccgggaatcgaacccggctctttcccgtgacaggggaatattcttaccgatgaactatagtaccaaatttggcgatgggactgggactcgaacccagctatcatagattaacagtctaccgcttcaccgtttagctatcccatcttatttataaaaacactcttgaatatctttataaataagcccctgtaaagtaggggctactccgagttcggtaacctggttctggttccagggtactccagcttttagacctttgtacatgacaggacactgcctgtattctgaaatacctttgttggggtatggcaacagaatcaacatcgcaacgcgctgcttctgttctaaatacactcgtaaatgtatttaaaaaagaagccccggcgaaccagggctaaagcaggaatccaatccgaatcattcgctggatttagttatgccatagctacttagcttaggcaacacctacacccagttttttagcaactttctgcatgtgggcagcttgctcaggatcgtagtcagggaacagagtagaaaagtcaggttctttgaaggtgatcatgttcttaaggaatttaccttctgggtactccttaccatcaataacagtggttttagccactttgatgtaagcacgagggtattcaccttcaatggtgagttcatcatcaccaaagcccatagcccagtagtaagacagggcatcttctacttcatcctcatgacgaatgaatttagtcatgttggactcatgaaccagatcataaatcttatcagcatcgaagccagcaacatgagccagcccgtaagctacagtgagaatgtcaccgatagcatcagccagttggatcatatttactgggccaacatcagcattcgttaggcgtttctgcaaatgtacctgtaccatcatgtcaggattactggcttcaatggcttcaacagattcttcaaggcacagctttgcctgttttctgatagcattgacattaggattggagagatcgcctttagggttaccaaaagcaatattaagttcagctactttttcggcattggacttcatttgtatggcctctttctggtttaatacaacaaattattcactaaggttagaacactatgaacgatgaagatcagagcgtaagtgtagcttaccatgatcaacctgttggcatcgagacaggatggaagaatcctcctactctgtcgattcttaaacaggatctgaccaatgctacgcctattcatgatactcagaccgcgaagatagcggagtgggaacgctaccgtaaaggtaagacgactacccctaaaggtgaggggcaatctaaaattcagcctaagcttattcgtaagcaggctgaatggcgttatgctgctttgtctgagccattcttatctaccccagacttatacaacattaacccagtaacttgggaagatgttcctggtgctagacaaaacagtttaattcttaataaccaattccagacacagattgatcgtgttgctttcattgatgcctatgttcgtagtgcagtagatgatggtacgatcattgttcgtgttggctgggattttgaagaaagagaagttcctaaacaggagcctgtatactctttctcagttgctgctgacatgctagatatctatcaaaagatggcccaggttgagcaggaaaatcctgtatatctcttaaattatccccagcaattacaggatggttatgagattctcaaaagtacagggatcccctatgcactgactcctattggtgtagctaacactaccgagatgaagacaattaagaactgtcctacggtagaagtctgtgatttaaataacctgtatgtagacccttcttgtaagggtgacctggataacgctaagtttgttatctattcttttgagacgtcccttgcagaacttaaagcagatgggcgatacaagaacctggagcagatcaatgtctcgaacagttcacctctcactgagcaaaactatgaagcacctaatgaccccaacttccagccggagggtaaacctcgaaaaagaattgttgcttatgagtattggggatattgggatactgataattctggtttgttacgccctattgtagcaacctgggttaacggtgtattgatccgtctggaagagaaccctttcccggacaagaagattccgtttgtctcagttccttacctgcctgttaagaactctatctatggcgaaccagatgcagaattgctgaaggataaccaggatatcatcggtgcagtaaccaggggtatgattgacttgcttggtaagtcagctaactctcagactggttttgctaagaacatgctggatgaaaccaacaagcgtaaattccaacgtggtgatgattatgagtttaaccctggtacagatcctcgtgtaggtatccatactcacaccttccctgagatcccacagtctgctcagtttatgcttcagcttatgaacactgatgctgagtcactgactggggttaaatcattctctggggcagaaggtatttctggttctggtttaggtcaaacagctgctggtgtacgtggtgcactggatgctgcttctaaacgtgagcttggtatccttcgtcgcttgtccaatggactcattaagattggtcgtaagatcattgcaatgaatgctgagttcctggatgaggaaactgtggttcgtattactgaagatgagtttgtgcctattcgtcgtgatgacttgccaggtaactatgatcttcgtcttactatctctacagctgaggatgatcaggctaaagctcaacagcttgctttcatgctgcaaaccagtgctcagactcttggcccagacttcagtaagttgttccttgctgaaattgcacgtctgaacaagatgcctgatatggttcgtaagattgaacaataccagccacaacctgatccaatgcagcagatgatgcagcagaaacagcttgaactgcttcaggctcagattgatcttacccgtgctcaagctatggctgaaggtagcaaaggtcagcttaaccaagttaagcaaggtactgagatggctaaagctggccagatccagtctcagactgacaagaatagtctcgacttcttgcagacccagaatggtgttaaacatcagcaagctctggagatggagcaagttaaaggtgataccttacttgctgcccaagctcttaaacagcaaggcactctggatcagattcaggcacagcatcaatctggtttactccagcaacttgctaataccagactgaaccataatagccagctacagttgttaagggcacagagggatttaaatcctcctactcaaagcactggtaataactcgtaatttatttaaaactataggcaggaagggcaatttgttgtattgtcctcctgcttctttcatgaggtttctatgaacatcaataatctcgacaacgatataaaaaagtataagcaacaggtagcactgggtgaagctttagaacgtctggaagttaatccagattttcgtatgcttattgaactcaactatcttggtactcatgctttggatctggtttattcgcgtactcgtgatatgaccccagataatgaaatcgctcggaagattgatgctgtagctaccttcaagcaatatctggatgaagtaaaagataaccgggcaacggctactaaatctcttagagaagcagagcagacccgagatgaattttacgacgaggactaacccatgagtaattcaaatgagcaactagatccgaatgacatcttctccatgtctgaggatgaattaagcaaatttgatcctgaacaagcagcagcggaagctgatgccctggctaaccctgaagaaactactgaagaacatcaggaagaagttcctgagtctgaagaagaaacagaacagccagaggaagaaaccacccctgaaactgatcctgagcagccggaagaaacttctgataatccagaagacacagatcctaaagcacagcctcagaaacctgatcctgactccagcaacgaaaacgcaccggactacaaagcgttgtatgagcaaattgttggtaagcctttcaaggctaacggtcgtgacctcaccattaaatctgccgatgaagctgttaagctcatgcagatgggtgccaactaccatgagaagatggctgctctgaaaccagttcgccgtgttgctcagatgcttcagcaagccaatgcaatggatgaatccactgtggctttccttctggatcttcacaataagaaaccagaggcaattgcaaagctcgtcaaggacagcggtattgatctgtatgagttcgatgtggctcaggcagataactatcaaaccagctatcaagctccaactgatgttcagatgcagcttaatgacaccattgaaacattagctactcaacctggtttcactgagatgtttaatggcattgctcagagctgggatgatgcaagtcagaagttcattactgaaaacccaggtattttgggtgtgcttcaggaaatgaatacccgtggtgaatatcagcagatcatggatgaagttagtcgtcgtcggttgttccaaccagaactggcagcacaaccaatgcttcagttattccgtgatactgaagtacgtttacgtgaagctggtctgttaaaagctactgctactcctgaacaaatgcagcaggtacagcaagctcaagctccagctgttgctaccactactcagcttaaacagggcactgcctctcaaactgctcaagcacgtcgtgcagcagctgcacctcgtcaagctccacaaaccagtcaacgtaaattaactcctgaagatatcttttccctttctccagaagaatttgctaagattgacccaagcaaatttaattaagaggttactgacctatggttatgcaatataaggctcctgcccaaggtaaaccgtccagcgttggcccgcagattaatactgcgtattaccagcgtaaggcaatggaagatgctcagaaagagcagtacttcactcagctggcttctgccaaagccattccgtctaacttcggcaaaaagctgaagatgttccattacctgccgctgcttgatgatcgtaacatcaacgatcagggtatcgatgcaactggtgctaaaatcgctaatggtaacctgtatggttccagccgtgatatcggtactatcccggacaaattccctgtactgggtgaaaacggtggtcgtgttaaccgtgttggtactactcgtattgaactggaaggttctttcgagaagttcggtttcttcattgagtacacccgtgactctctgaacttcgataccgatgctgaactgctccagcacatcaaccgtgagatcatgattgctgcatctgacatgaacgaagatgccctgcaaatcgacctgatcaacaacgctggtactatcgtctatgcaggcgatgctaactctcgtgctgaactgggccaggatgacgtcctgtcttacagtaacttcatgaagctggctatggctctggataaggctgatacgccgaagaaaaccaccatcctgtcgggtactcgtaatatcgatactcgtgtaatcccagctgctcgctatctgttctgtggccctgaactgcgtcctaccctggaagcaatgaagaacctgcatgatcagccagcattcatctctgctgaacattatgctgcgggtacttccctggctaatggtgaagtgggttcagtaggtcagttccgtctgatcgaaaaccagaagatgatgaagtggtctggtggtggcgctaccctggctagtggtgacgattctgtctactacaacgatggcacgaaatacgatgtattccctctgctgtgtgttggtgacgactccttctctaccatcacgttccagacctctggtaaccgtgtgaagttcgagatcaacagccgcaaaccaggtgacaatgttgaccgtactgacccgtatggtgaaactggcttcatttctatgcgctggttctacggcttcatggctcaacgtccagagcgtatcggtctgattctgaccactgctaagatgtaatactggtttattaaatcagtttgcattaagcttaagaccggggaattttccccggttttttattaactaaaggtaggtgttatatgtcacagtactctgaacaagatcgtgaaatgctcgaagcccaggctaaccaacttggtgttgaattccaccctaacattggtattgaaaaactggctgcacgagtacaagaagctatgtcttctatggaacctaaagagaaagaacgccctgctaaaggggaaaccaaagaacaacgtcgccaacgcaagcataaagaagctatggctctggttcgttgtctcatcgtctgtaatgacccaaataaacgtgagtggcctggtgaatggttgggcgtatccaatggtgctggtgtccagattcgtaaactggttccgtataaccaacctgataaaccattccacttacctcgtatcatggtaaacatgctgcgagaaaaacaggttcagatctttacttctaaacctggtaaatatggcactactattcgagtgtctaaatctattccagcttataccattactgagctgcctccactgacccaagcagagctggatgaactggcgcttagccagctgcaacgtggtgctctggacgactaaggataaaccatgactaacattaccattgatacagtagtagcccctgatctggatatcacagatcttactactattgatcttaaaggtactggtgtctgggataagttgctgcaaacaatgcgtgttcaacttgatgaacagtttagtaagaaccgcattactgggcctacctatgggcagacctatgcagcaacttatgattccaccctgcaagctgctatctcgtttttgttagccaaagaacgtcaggctttggagtttaagcagcttgaattgcagggtgatcttacccaagctcagattgaccagatccacgatcagatgcagaaaacgccgtatgagattgagcagatccaggctcagacggctaacatcaccaaagatactgagcttaaagactatcaactgacttccctgtacccagcacagctggcacaagccaataaacaaattgagctattggaagcccagattgatgttcagagagaacagcttgccctcttaagtgagcaggtagaacaagctaaggcacagactgaatactatgctcagaaaactattactgaaaaagctcagactgactcaactgtcattggttctggttctgttatcgatgttcaagtcgaactgatgaatgcacagaaagacgggtataaacgtaatgctgaacagcaagctgctcagattatgtcgaacacctggaacgtgcgtagacagactgacgaggatacctcagccaacagtactaacctgctggatgatgctacggtaggtaaagctatccagaaactcttagcaggtattgatgtaactgttaccccttcataagggtctgatatatcataaagggagcctagtgctcccttcttttttatgaggtcaccatgggactttttagcggcaagaaaaagacatacagggatttttcatactcccgattaataaatgatgactacttacctgatgtaattgggcaagccattactacctatgtgttggatacagataacaccaagtcactaactgaactgatgctggaatatgggtggtctgctaacaatgttaagtgggatgctgcttatcgttgggcagcaaaaggtaagtacacttatggtttaccctccgtatctacagtagctgttactgacttcactggggcagagtccttaaatgatgttctggtttctcttacaggacagtcagatctgacctatgtttacagccaatttgtgcctggcaatttcagacatgccatgtggcaacagctaatttccactcaagggtataatccaacctctaatgagttatctacccaatcctcagctttgggtactgcttgttatctccataacgctattaactttatcacccctgaaaccagtgaaagagctgaagatgttatgttccagcactggggatactcacctcagagtggttacacacctacaagagtgcaggacttaaccagagcagatacaccagatgaggttagctctactggttccaactatattcgtgttgagtatgcttttagctttgctggtgttaagcgaattactaccgtagaaaccactaaggtaactaccactgttcgtactcccaatggatcaggtgggtacgatgatgtagttactgaagaatcctcagataccaccagcaatactacagactggaatgggtttaccatgccatctgatgtgattagctcagtggatgtgggaacgtctaccaatgagactgatgagactgaccctactcaaaccactgaaactactgatcctgatacgggtgtaatcactattgtagccactgaagtgtttcgacatatcacaactaatacagtcaatgttaatgtagttgctttttttaatactggttttggggtttatgactacaacccggcagatgaagacattgatacagatactgtacttgatgatagtgactcaggtaactatgaccctaatgctgtgttagatcctagtggggaagataccgatgataatcctgactattttatggtttcttatcagtggattgatggctctactacccatattgggtacttcacttatcagtatggttcaggttcttaccctgatctggatggcatcacaggcacgacagtagccgattttggtcaacatttcccccgtatctactacagacttgggggtaagcgtttaatctctgatgactaccaggatacggaagcctataaaacttctgttaaaatttgcaaaaagttagggcttgactggcttgaagttggcgatcagatttatgaaagtctcagctcgctaagtaaagtcagggatgtgcttttaatcctgcaagtacctgctaatactgaaaacgccctagagcaggagtacctttttaattacttctacactctctgtaatgtacggcctgagtatacagaggctatgtgggacaacacaggaaatactgggggatctgaggatgtgcccgcttcagacttagacacctatgagatgcatcttggtgctatggttaaatctgaagatactgatattgctacttacaacaatatggacttacttggctatgccaagatcacaggttctattggccctaaaggtagtgttacttctggttatgcagaagatggtgtgatccccactaaaaattctgatggtacttatggcactaagtccatgacctaccatttctacaaactccagacctcagatactgagtacgaagaggtaagggtatatgagttaactcatagcgttcgtgtgggcggtagcaagataacccgaggccatgagcatgatcagctgatggttcctttggatcatgcattcagaaagttgttttctgctcatgaccgtgaaactttgtatgctcgtgctttgcaaatactgatctgtactgagtacacagttaaaaccaaatggtatcaaactggcttgttccaggcagtaactgttgtagtagctgtagctgtgtcctggtggacaggtggtgcttcattatctcttattggtgctctgactgctgtagctacagccgcaggtacaatggtggccttctcactactcagtaagtatgtcttcagtaagcttggtagctgggcttctatactggctactgtggttgctgtagttgctgctgtgtatggtggttatgtttatttttcaggcactacagggccattcagcttaactgctaaaaacctgatgcagatttctaacattgcatttaaagcctctgatgcttccatgaagggacagcaaatagctatgcagcagaaactgggatctcttcagaaagagttggaagaaaaacaggaagtactccagcaagctcaagatgagttaaaccagggttctaatactatttctgactggatattccttcaggctacaagtggctatgttaacttaggcgaaacagctgatcagatgatagcccgaactctgaatacaaacattggggcactggctttacagttacctgatatgtacctgagtcaggcattgtctttaccctcgtctgtagagatcatgcagtttatgcaacaaaaactgtatactgttccagacgacgaacttaatccacttatgtgaggtgactaatggctggattatcgatgtatccaagtctgtgggatcaggggtcagtaaccccatccctggattcgttgagtactggttttaccaactcagcaaacacttttaacaatacggcccttactggctcaggtggttcaggtagtttcctggatagcattctggggggtgctggtgacatgtctggtttgcagatgggccagcttggtctgggtggtgtaaccagcttgcttaatggttaccttggcttccagaatctgagtctcgccaagaagcaataccagtctcagcttgatcagtttaacaaacaatgggatgccaataagaagttaaccaatgcttctctggcagaccgtcaagctgctcgtgttgcaagtaatcctaatgcatatcagtctgttgatgactatatgaaaaaatatgggatctaaaccatggctattagactgcaacaaattgctgcacctaactttgctggttctaaccaattactgctggcagcaaaccagcagattggtaatgctctccaggggctgcaaggcactctggggcagtatcgtgacgaggtagtacgccgtaatacagctcaggctgtaggactgcttactggggctacagatgctaatgatctggcccaacgccaacagcaagtagcacagttggttcagcaaggggacattgatcccactcgtgtatctgaagtggcagcaaccatgccggatactttgttaggtcgtcagactaatcagctaaagctaaaccagattcagactgcacagcatgatgccccattaatgggcgcttatatgcaagctgttatgtcaggggatcagaatgcagcaaaaggtattttgtcacaattccaggggaatgcttcagatgctctgaagtttgcttctgattgggatattaaaaaccaacagctgggtattcaacgatctgaactggcacagcgtcaggcacagtttaatgcctcacaggcagcagctagggcaagggcaagccaaagtaatgcattgctcaaagcattacctggtttacttaatacaggtaatgttctgcaaggtaaggttcaagctagggatttacaggctaatgctgaagatgctaaacagcgtctggcaatggatcctgttaataaccctaagcttgatattgctggatgggctgatgccaataacgatgcctggtttggtaaaggcacttctaactatatttataatgctctcaaggatcagcctgcttttaaagcactgaaccctcaagagcagaaaaatgtactggatggtgcccttgctaatgagtctaatcgtcctggtgatgtatcgctgaagaactatgcaaccaagtatttgactgatacgacttctcgtttaaataacctgaagattaactcacgtcaggcactggatgctcaagatcagcaatctgtaatgcaagctcaaagagatcgcctaaataacctgcttctgcccttacttttacagcagtaatgaggttacaatctgggtactccacaatactaaggaatactcagatggctggtgaaaattcatcccctctggacaagtttcttgtcccacaacaggtaacaggtcaggaagctgctcaggcacttcctgcacctactcaaccaactatcgcccaacgtgtgaatgatgcttctactcgtatcctgaataacctcacaggacagggtatgtatccaaccgaagaaggcgaaattgctcgactcaaacgaatcaataatgaacagtcagcattagctaaacaggtatctactcaggattcagattttggttggtcttctaccaatatgctggatgctaatacttccccattgactgatcgagcagcttctaccatggctaaccttggtaagggttttgttgatgcagttaatggtcttgcaggtaaaacagataagacttttaaaacacttggtaatgttctggatcaggcttctatccctaatgatgcactggatgcttatcgtcgtgttcaggctggtaaaggcactgaagctgataatgccctgttagatcgtcagggtgcctggtggacacagcctatcgaagtaaatcagttcggtgtaccagagatgggtaaccagactctgcgtcaacgcctggatgctatcaacgaacgtcagaaaacccaaaaccagagtagttatgacaatcttgaaaaattggctaaccctactcagatgcagcgagctgctgctgatattgagaaatcaatcgagggtaaatcagggcttgataaatttgctgctggtttagctgctattgctcgtaaccctggtgctgctgctcagactatggttgagtctgccccttatatggttggtggtgtcccaggtatgattgcttcctctgctatgcagggtggctcagtattatctcagtatctagatacccaacgtaaagcttccaatgggcagatcccaacagctaaagatgtagctattggtactggtttgggtgttgttgatggtgccctgaactttgcagagagtgtcattaaccgtactgctatgatcccaggatctaaagtattacctgctggggttgctgatcgtctggtgaacgcagcacagcgcatcgcaccacgcagctctacggctgctgctgctcttgcgcgtgtggctgctcctaccgttgaccttgctaagaacgccttaactgaaggtctggtatctggtgctcaaaaccagattgaggagaactatgcgaagggtaaaaacgaatgggataccaaaggtaatgatgttgctttcttccaggggattgctgctgctactggttttggtgctcctcgtgctgcacttagtactgctggtgaggtagccaatactgctgctcaggctatgcagaaacgtactgaagctcaggatccagtgggtcaagctgctcgtaataccaccccagaagatttaatgaatcctcagtcagaagggtacaacccagctgctgcaattcgtcgtgctggcatggagtggactcgtaacactgatgctaccactgatgaacagaaggctgagattcaatctcaggctcaatcagctatggatgctgctcagaatgatcaccagaataacctggatatgattaatcagcgtgctactgctgaacgtactcttgctgatgctggtaaatttattcctgctattcaggaaagactggatcaacttagtactgatcctaatgcagatcctgatgctgttaaccagttacagactatcctggctcaacagactgaagctcgtgatgctgcacaacaacaactggatgctatgccttctcaggaggaactggcacagtctgctactcgttctgctgaagtactggatcaggctaagtctgagtttggtaagttctcttctgctactggtatgaataccaatacagctaaaccagagaacccaacagcttctgatattatcagtcacccaatgtcttataccaatgaagacctgcaagagtttgtgcgtaatgctcctgctaatgctactcctgctgaactgggtacacttcgtgcattagctgatgccaaagttgcagagaatgctgttaagactggttctaaggttaatagtgagatcttcaaatccacttctaataacctgtcactgggtgattaccaacagggtatcaacactgctgtacaggctggtgatactaaccgtatccagtccctgatgactggtatcaataactttgaaacttcccatactgctaaagcagatattgctcaacagtacctgaatgaagctaaacagaatggtaagtcttaccagatcctgaaaacttctaatggatgggagttgaatactggcaaacgtctggatgctaaagcacaggctaagaatggtggctttactatccacaaaggctctactggtctggttaacaatatcgttaatgaagccaaggctatcacagccactcgtcagtatatggaaggtattgctaccccatctactaaccagaatgtgactggctcgactgagcaagtagcaaacccggaggcgcagccagagggtgcagctactatagcaggagagacaggagcacaagaacaacaagcacaaccaacaatcagcccactgaccacacgagatattcgtgcaatggatcaggcaacgctggaaaaggttatggctactactcaacaggctatgtcttctgactctaaccctgtgctggctcgtaacctggatgcacttgatcgtgagtggactcgccgtgctgatgtggctactaaccagaatcgtggtgttgatgctcctcaccgtaaactggatgactcctttaagcctaaagctcaggaaaatgagatccaacgttcacaggctgagactgctactcaaactgagaatgctcaggctgacattgataatgagtctactggttcagagtctcaacagactgccccagttaacgtagatgatgttgttaccaacactgataccctgactgagactcagcaagacaatgtagccaatggtgctctgagtatctttggtaaagttggtgagtctctgaaagctctgcgtgagaaagctttggctgaacctaaaggcttacagaaccttgtgcttactggtttcaaccagcgagttcgtccaggttttggtagcccactagtagcagtgaaagacttcatcaatactctgaaaactgctgtggatactggtagcttcactgaagttaaccgtttcctgaaacagcatatcagtgagtcgaaagctgaaggtgctaaacagaaagctctgctgaaacagtttgtggagttccacgatcacatcacagctaacctggataacatcatccgtactaaagcccctgaatatcgttatcaggactttgctcagtttatcctggatgagaatggtaactttgactccaatactaaaactggtattgcagcaggtatcttctcctggcttggtgaaaatggggataagatgttcctgaaccagagtgaagtagctaaaactctgcgtatcaaagaagatcagttaactccacaagctatgtctcgtatggctgatattggctatcgccaagacctgatcatgtcccaacttggtcaacgtatctatcaggctatgggcttcgctaaacgtcctgatgttgatcctaaccgtgccagcaaattgcagaatgctctgggtgcttatgccctccatgccatgtattccaatggttacatggaacagtctgtaatgactgctaaagagtacttcgatctgcaaaccatgggactggatgaacaatcagctaaagaggctgcacaagctttccagaatgactttggtgtttcccctaatgatgccaaacacaagattgtgtttagccgtcctgcacgtaactttgatgcagagggtaaaccagtagctattgaggcaatctctgacattaagaatgggatgaaggatacccgttctctcatgtctaagctgtttggttatgatcctgctgtacgtgaggttctgaccactaagcctgctggtttcaaacagaaagtcttcggtaaaatgaaccgtgaagttccttctgttctggctgctcgtatcagcaaagctatgcagtacgactacactattgatcagggtgtggtgaatgctatgcaaaccatgtccactgtagataatgctgccctgcaacatatctttggtgtacgtactgatgctgatgtacctaacgaaatggagatcttcaagaaaggtcgtgaagccaagaatgctgatattcaacgttctatcgagatgggtttagactttgctgcacgtactggtaacaagcctttctggatgcctatggaagtctggactaaccaacgtattggtgatctggcttctgagttcaacccacaaggatccaaagttcaccgtgccatgggtggcttgagtgctcaccaggttgatatcaaagtcgagcgtaatgctgctgtactggatgcagacggtaagcctactcaatatggcctgttccttgtttcactggctcagggtatggaagaagctcctgtaattggtgctgatggtaagaaactgaagtctgttgataagcagacctatgctaccttcttacctgctttccagaattacctgcgtaaaccagagaacattaaggctgtacgtgctatgcagaaagtgatcgctggttcagctactactgctgataccaacgtcattaagaatgctgtggctgagtatggtatgaatggtcagtcttttgctgccctgcataatctggctcagtatgctactgctctggagtctggtaagtcctctgttaagctactggctcaaatggaatcggatggtgttactaacggccctatccttaccaatatcctgaatggctctgctgacttcgatctgctgaagcgtggtggtatctaccgtgaaggtgacaacattaccaacatgcctacctaccgtgagctgggtggtcaggattactatgagctgctgggtgatgctatgcgtcagcattgggctgactacaaaaccaatgcacctgctagtcagcaaggtcagatccaggcactggaatatttctctactggttatggtgctcgttctaaggccaagactctggctactccattcaactattctgctggtattccagcactgaaagctgctatgggtcgagctactgtagaggatgtttactctaagatcggttccctgattccactggctaaaagcaataacaaagcagactttgccaaggcttatgctgaggtaagtaagaatctttctgtactcctgggtcagaaagtgaatctgccacgtactgctgatggtctggttaagttcagccttaatccggctcaaactaaacgcattattgatgtggattcccagactcgtggtgttgctacagaggctgctgttaatgaggttgctgctgacttcattgcatctcgtgatgctaataccagtctggttaacacaacctttaccctggctaaccttcgctacaatgctgctaaagctgcactgctgaagcaacgtattgctgaaggtaaaatccctgtggatgctaaaggtgctccactggaaggactcactcaggcagatctggataccctgtctaacatgattcctaatatgccttctgcaactggtgttctgtctgagaatactaaagcttctggttacccaatggctaaggtagagaaagcctttactgctaagtctcctgccaccagcattgatatctacttcaaagaagctgctaaccctaaaccagcaatggatgctaatgggatgctgttgagtcaaggtctggtaggtgggtataaatctacccagtctactgtgactgagactaagctgaccaatccaggggttgctatgggtgctaacgttactcagggtactgatgctgcgatcagctctgatgtgatcagtaagatcgaaagccagaacgtgcacgatgctaacatcctgtctcccgacaatgtgctgaaaggtgctcgtatccagaacaaagctatgtttgatgctgtggtttcttaccaccctcaacatctggctgctgctgcactgctgactgaagttcgtagtctggctgatgctaacctgtctaccaacgacaaggttgcagctaagaaagctctggaagccatgaagactaagatcctgggtaaagacttcaagggcaacatgaaagctgctctgaacacaatccttaaccaggcttatgatcgtgacattaagaaactggaaactctctctgaagtctatgctgttaaccagtacggtactgaaggtggtgagtacctgattactgatgctgatcgtaagaagattggtgatgagattacacgtctgaaacgtagccgtgctactggcttacaacgtatctctgacatgttctctaagggcaatgccccaaaggctgaagccagccagtatcctgacaagatgagacaatacctgtatgaggcttcggcctctacaggctctgtgtcagcttctgaggtgatggcccgtaccaaaggtaagtttgctaacctagtgtataacgaactccacaatctcatttctggtttgattccagccgatgctgtggtgaacgtactggatgggcagactatgcctaagaatgttaaggggcagtcactgccccagaaccgtgatgctattgcatggtcttatcaagataagaacactgcgcaggttaacctgtcactcagcaaagaggcttcacctgaagtcttgctgcatgaactgactcacattgctctgggacgtgcaattgctactgctgattcaaatccaaaagtaaaagctgtactggctcgtacagagaagctaatgggtagagtaactaagctggtttcagctgatcctcaattgactcagaagtttgcccctgctctggctaacgtggatgaattcatttcctggggtatgactaacccagaattccaacgttaccttgataccattactggtgtgcctgaaatctcaggtcgtaaccgtggatggttgggtactgcctttaaacagtttgtggatcaaatgtcaggcatctttgctgctgtaactggtcgagctattaatgctcgggttactactgctctggaagctctgaccttcgatactgcacacctggttcaggctattaaccctgctgctattgaaagccctatatcttccattagccatcctatgagcaacagcaatagtgctgctgatcaggtagctaagtttagccatgtggatatctttgataacctggcttcaacaggtggcaagactaactcagcacaattcacaggtaacctccgtaatgtaatatccactgtagcggatcagctttacggtgctttaggctcaagagtcactcagaatgccaatgagaattatactcctggtcaagtctggaatgaggctgtagccactgggaaagcccctgtcagcaccgaagcactgagcaatgggtttgtactgactaatcaggaagcctttgctgtggaggccattgaggctgctgtatctgaatccctggcttctggttttacttcaccagttaaccgggagattcgtcgtacttggcaagctgctaaacaatccctgaaaccagaagacttccataatggaaactggaatcaggcaactcaggcagaaaaacgagctgctcaacagaaatggaattatctgtttgatgtaacgaatgactctggtgagtcccagcatctgtctcgttttattgctatggctattgggcatgaagacaccagtaacttactcggcttccagatggaagatggtaaggactctggcaatactgcctttgaacaggctactgcttactttaaccaggctgttaatacagtctctggtatgctgaccaatacccatcaaggacaagctgccaatgctcgtgcccaagcattagctgaaaagctgatccagattgaacttaagaaccgtgataccaccatgaatattcttactggtgggatcgacaaagtagagaatgccttagatacggctgctgctaagtctaaacagttcctgggtaaaatcgttaaagctacaggtattgatcagtcctccaacaatgctctgaatgctatgggcaaagttgcaggtttggctgctcgtgatcagttaggtaacctgaaagatactatcaaagagttccgggactttaatgcccctaatactccagaaggctctctggcttccattctgactgaagcaacgaatgctgatgatgtacgcgctctgcatgaatccctgttacgttctactaaacgtattgaacaggatcgtgcaaccttagctgctgttactgctaagaacttgaatgagatgtttgataacaatgggcaagacctgactaaagaagatcgtacagcaatgacttattcactgcttcgtactgaccttcagtctgtattgcacattgaaggtatgaatctgaataacgtacataaactggtttctaatactggttatcgtaagcagcagatcagtaaccttgagaaaaccattagccagtatgctaacggtaatgataagatcatccgtgcgaaggctctgggttactggatggctactcgtagaaataccctgggacgtgatttagttctgaatgcaaaagctattgctaccggagctgctactcactattccacagtaggtatcgaaccgactcttgatgaagtgaacgccattgatgctctggcttcaatgtacgctctaagctacaccaagaccgaaaaccgtgttcgcactgctgctgtaatggaacgtgagcttgcacgaggtaaagacaatggcatcaaaatgctgatggctacttatgcgaacctgatcgaggattctgctaatacgctgtttgttggaaaccagttgtctcgcattaaaggctatctgcctgaagataccaatcctcaccatgacttacgtgctgttgagttggggagtgcagatgaagcagccctggtgaacatgggttaccaaccagtagccccactgtcccaggattctttgtcaaaacactctggacgtgtactgtacgttagcaaagagaatggatatcaacgaaccgtgtctggtactttcagcttaactggaagccagcgtaaaggttcatcaataggtggggatcgtgctgttgctgaccgtgttcgagctgacgagttagaacaattaaggcaagcgtcctatgcagacgtgcgaggacgtgaagcactgtcccacactgcctttgatccttcccaagttcaggataactatgtagtgcctgtgttaagcactgatggtcatatcatggacttccgttatatggctacccacaacactattgatactttccttgatcgtaataatgactttgctgatcttgtaggtcgtttagctggtcagaatatcgataaaggtgatgcaccaagccagaatgctaagatccttgaagccctgcatgaagactctacggctaatatcctgaagaatcctaatgcttactttgagattgggcctgatgcaccttctgagcgtggccgtgaaatctgggcaatgatgccatacgaagcacgtactaaagctgcctctttgtggggtaatgaccgtatgtacattcgtaatgatctggttaacctgacctttggtttccgtaagtactctctggctaataccctggatgtagatccagagcaacgtaacattgctcagggtgttgctgctggtttgctggaagctgcttttggtaataaagccaagtcatacgtaattaaaggtgaacgtggtattcaggaatttatgcagacctacaaagatctgatcgttattcgtaacctgaaaactcagttcagcaacatcatgtccaacactgctctgctggctgcttatggggttaaccctatacgcatggttaaagatattcgtactgctctcgttgctggtatcgattaccgtaaacagtattcattactgctcaagtatcaacagcaacaacgtgctggtattggtgactttgcccagatggaatccctgatcaacgagactcaggatcgcttgaatgctaacccactggctaagtttattcaggcaggcatgatgcctaccatcgtagaagacgttcagcctgatgctgatggttacacttatggttctaagatccgtaagaaatttaatgaggtatctgctcacctgccagcttctgctgtaacagctgctcgctgggctgtgattgataagggtactgcacctcataagttcttgagtgatgctgctcagttcagtgactttgctgctaagtatgctctgtataaacacctgacagaacatgccagagatcgcctgagtcatactgaagctttacaacgtgcctctgatgcttttgttaactatgacattccagctacagctactcgccagtatctggatgatatggggatcacaatgtttacgaagtatcgtattcgtattcaacgtgcaatgttctacctgatggacaaacgcccagcctctgttatggcacacatggctatcacagggcagttctcagcagcacctgatgctatggaacccttgtttgctcgtaaccttgggaacccgttcacaccttctgtattgcaaggtggtagcatcttgaatattccaatgccttggaacttattcagaatggcaaactaataaaaagcccctcattgaggggcttctttttggctttatgagtcacgcttttcctgaatgaatgctccaatgaggcaagcaataaaaattacagccacaaagaaccagaagaagctaagtaaccagaaagctaccttcattaaagccagtacagcaatggctgcaatcacacagaacaggccaataaagccattaataacgtgtctcatagatcacctgttagtcgaagttagcaaacgggtcgtcttcagtgtctgctggtttagcaaagcctgcttcactggtttcaactaccttggttaccggagtgtctgcctgagcaaacagctcatcaccttcagatgaagccagcccagcgtctgcgaacggatcgacttcttcagctacagcagcagcagctttagcttctggcagcagttcattttcagcacgcaggtttgcaccttcgtcaatgtcaaacggagcatcattgtctgcatcactggtttcagcgaagaggtcttcttcactttcagactgagcttctgcttcagctgctacctcggcctgagctgcggcttcttcagcagctttatcagcttcgatttcagctttggtacgacgtttacgacgcttaacaggtttgtcagtttcctgttcatcctggttgtcgtcatcgtgttcttcttcctgctctgcttcttcctgttcagcaacaggcgtaccaccagaaaccagaggagcttgcagatcagtaacagatttcaggcggaagttatcttcgcctacagctactgctgccacgatctgaccatccagaatacctacttcaacatcggctgctttggctgtaggcacgagactggtaaacgcatgtttggttaccagttcgatcagatcttcagtagaaagcaaaatacgcatagttaatccttagtagctaacatggttagcattttgaaagtttcagttttaattccagcatgtacggctgctacagcatctgccatgtgctctgctttactggcaatgatttggcctttgagtttgggccagttagcatcagggtataaaccagatgcccaatcaataccttgctgcttagttgcagaaggtttgccagtgatttccattctggtttcagtagcattcacacagattacaggtttagcaccatgactgtttcgtatggctgctattaatccaatacaggcacctgcacccagtgaagctctggcactctgactgccatgaggaacttcaatacagatggcatctacgtaaggcatgtagctcattaccttctcaaacaggtattcagctctggctaaatcctgagaagatttacgtacttgcttggaattatctttgggtggttggataacatccagcttggcaacactaagagatctggcttcagtgtcatataacattgcagccagtccccagttactaaagctcggatccatccccagtagtttgagtttcattaggatcctcttccatagtgaaaggcagatttaagaactggttcagagcatactctacacccagtttaaataaagcacgttcacgaggatcagtaatcaactcaggttgatcagcaccatcgaattggacgttaagatcgatatcgtccggggcttggattacagccagcaggtgatggccgatgttacgatgccaatctgctaccaggaaacctaactgaaggtggttctctactggcagaatgttttcaggttgatcctgtactacgtttgaatcttgggtcatggtaacctcaaagtaagccccctggtttagggggctgagttattacatggtgaacggatcatcaccagtggtggcattgtcagatcctgggttgaagccagcacctgcaaagttaccacctggagcaccagcgttaccctgaccagtcacttctttgaagcgatcccagacctggcctttgttagcttcgagccacttatctttgaaagtagccacttcttgcttaccacgaatttcctgctcagtcttatcgtctttgctgcggaagactttcgcaatggcattgatctcacgagcttcattgattggctcgtactgaccattgtcgtttttcttctgcttgttctctttgatacgctggatagcaaaggtgatcggcttaccgcacagatccaccagcataggaacatcagtcggaacttcggctttcttctcgaagttatacaggttgatggtcttggtttctggttccagtttaaccagaggcttaccacaagccagcaggcagatcgagtttgccttcaggaagttcttggtatactcgcctttatcgttgacgactttaccctgaccattcatgaaccagatctgctctttgtagatgccatgatcatcttcgaattcgatgttcatggcttgagctttggacttatccgacttggtaatgtaagccagcttgatgatgcccggatagacgtcagtgtcacgaatgcgcataccagtgcccagggtatctttctctactgctttttctgcgtcatagttaaaatcaaaataagacatgttagttaccttttgtttctaggccatggttctcatggaagcctaattcaattaatttctcagcccggcagatagctgcttcgttagctgtcttgaaggtacgttgccataccttcttacggttcatcgtgatttctgctacatagcgatcacgacgtttgcaataccaaataccttggtgaccagtaatggtattgctgatggcacccctgtttcgcatattctgaagcatcgtagtgtccttcagatttactgctctgttgtcatcacgaatatggttatcgtggtctacatgccctttaggccactgcctgttgtacatgtagtaacagatgatatgctctccataggtagtgccgaagattgttatatggcggtagccgctagccttgtggagactcccagcgcgactaccgataacaattctcttattacaagacttgctaatccaagtaagatgtccagtaagagcatcatattttagtaccttctcaagcatttcaagggtgagatcttctttaggaattttcatgcgtaatactcatgcaaacggtctaagaccaactgcatgtcattatcgatgaaggtttccttgatatcaaataagtcctctgggccacgtaaacgctcgttaatggtgttcttagtaacctgggtctggaacacatgcttgtacccgagcatctcctcacgctcgttaatgtgaagtaagccgttctggtattcttccagatccgtaagcttcactttcttacaggcaataaccagactgaagtatgactcaatgccctggttcttcagtgcccctttaacaggtacacaggtttcacgaaccatgtcatcgttaacttcatccttcgtgtgagctaagaagatcacgttcttggtagacgtggctaccagcacctgcatcaggtgtttgaactgctgggcaaattggccccatgcagcttgggtatttgagctagtaagtacgagctggctctctaccatatccatgtagtacgtcagtgaatcgactacaatggtgtgaatattcggttgggtttcagcccactgaaaagctttagggaggatatcccaacgtgcaatggtacgttccaggaaacctgatttgaacggcagctttttacctgactcacagttaaggtacagcacaccttccgggttcttcaggttcttcagtgaccgcgatttaccacttgctgatttacccacaagcagtacaaggttgtcattaacgctgatttgatcggacataattacctcttttgaaatgcccccgaaggggcaaacccacaaagggaacggaagttccccaacacacaattacttaactttcttagcaatggtgagcatgatgctcccatcaatttcactttcgtccagcttaccgggaagcttgttgtttagttccttcacctggcttctgatacgatccagagagaaccctgcatctaccagtaccatggcatagttgaacagctgcttattacggttaccgtcaccagtgttgttaagtacccaacgttccagattatccagttgatgctgatcagtgagcatctgcttacgatcttcgttcttactggttttaggaatgaaggggagtacatcgaatagctgaccatccgtatactcataatgccctttatgtgttaaccatttcttagaacggtgtgaacacgagtcatcagcttcaaatggcaagccttcaaggacgttgttataaaactccttgtagtccttggcatccagcttcagctcatagttaataggcagaatgatacggaaacggttagtctcttcggtatgtcgtttagtggtgtaatacagagccttgtagtctttcagcagtaacttagctgtagacagctgacaggttccatccacatcaataaccagaaggttaaagccaggaatggcattctcttcattacgataaccgttcatcactttatgggtgagccagtgaagatcaggctgatttaccagtctgtgtagttgatcgaatggtacgtctttaggtacgaaaccagtggttaaatccttgctgtatgacaagatcatctcatcaaggttggttggtttcagagattcaccactcaggaataagatgccatcagtgtagcttcgcttcacaatgatgttgtttttataaccataagcaatagccaggttaatcatctcatccttctggtttttaccgccacggaagtaaggcagatcctcatccatgtcagccagagtaacgtctgtgcctacatcagctaaatacttagccaacttggcatagttacgttcaggcgtaagcagcttggcaaaggcttcaccacattcttcagtaagcttaatggcgttctccaggtgatcctgagagagcacaggtgaaccatcgacaaaggcataggcagcagccagcttcatgcacttgaagaaacggttctccatttcacttttctgaatggtttgatactcgttgtactgcttgcttttggcttcacagtccagacgatactggatgatattcttcagcacatcacgagggatggtgatagcttttcgcaggttggaaatgtctgcaagcttctccagttttttacccaggtcagtgataaaggtatcagcattggcatcaaacatttgtttcaggatatcgtcagcagttatcccttctggtttcttggctttcagcaggaaaccaaagtgacaacgacgtgcatatcccatttccagcatgtcatacagacgacgctcagttacatccccatcaaacaacttggtcggtgtgccaaacaacagcatgttagttggagtaccacctacaagtttctcatggcgaacgttttcagcagatgacttgatcaacttatcttttactaaaccaaggtcatagagttccaggaaagtatccagtacctcagtctgacctaccaggtttgcaccgatttcatcgatctgtaaattcacaccaccagcattacccataagaagcttatgacgcatttgcttgacagctggggtagttgcagagtcaaagctaaacagcaagctgcctaagctttcaaactccttacgcaccttctccagctcatcctctggatcaaccagattagatgctgtggatttacgttgagcacgtttttgagcaagctcaaacatgttctgttcagctactgtagggaaagttacttccaggaatcgttcacggaatcctgcaagcaattcacgttcgatcaggctggtggaatagcctttaccagtacctgacggagacaggttcagagcgtagatattgataggcagatcgttacgatcataccctttaatgactgctcgcatagacgaggccattacaccccagtagtaagccagaactaccctgaaaaagagtcgttcttcgttaagggttttagcattgagaaaatcaacgatcttctcactggtgggatgatatttcatctcactcactggtttgatggagatcatacttgtccttatacttcgagatgaccagaacgaattagctcatctttttgtttacagattggaaaggctgggcagtatgcacaagctttaacttgaccagggttatgtacgatcatacccacgttgccatcatcagccagtcgcttgtaagcttcagcttcagtgtcaaagtttttggttgatcgggtcatgtttgcagggtttttgtagtacttccagaccggagcatcacgccataactcttcatcagtacactcgggaatgtcttcgtctttggcctgtttatacttctcatacagggcaatacgaccttccacatacttctgagtatctgccacagacattaactgataacgtttggtttcagtcttacgctgtggatagttagggttagctttggcttgggcacgttgccagtcggtaaagataaactggatagacattacatctttagtaatgatatctgggttaagccagcgatagatactaccttgcagggcataatccagatccttgctgcccttcatataactgaaggttgaagtggacttaaagtcctctaaagcaccattacctacgaagtcaaacttaccagtaatacggtaacccatgacttctttctcagatcggatttccatatacactgggatatccccagccttcaattcccatggtttagggttaaccttaaccttggcaatcaggtcaggggagtaacccagcttttccatagctttagggaagttttcaggtgaccaagccagttcgatacctgagtgaatagctgtacccatacgagaagctaccaggtcttccaggtcagctgtttgcagctctggaggaacacggggagtcagtatcaactgacgaataggcttcagcagtttggttgctgagaaggttccagggatataatcatagtgatcagtagccaggaacactgccatagacagtgggatcttagtgttgtttgtgtaaatcattagctgattcctcaccccacaaggctgcatatgctgccagatcttcaaagttatccagcttaaaatcaccctggtttgcccggacgattttcagtaggacttgaatgagccacccatcagccggggtaagatccttaccacgaatcttattgaacagctcaatgaccaatggaatggaacgttcaccttgatcgttatcataggtaactgcacgatcctctaaatgcccagcagcagccagtagtaccttgtgggcactgactgttgtatccactggtttaagtttaagatcttcaagctgtgcctttaggttagctatggattgctcatactttttaacctggtttccccagtaaacttttttgtgctctgcacaagacatacctaagtagttcttggcttcatgcagacacttttcagcataagcaagagagcgttttaatgatcttttactcatttggatttcctttgcaaagaattcacagagtgcccggaagggcaccccacaaaacacttaagcttgacaacttaagcattcatccttaacaaccacaccacttcgtgagtagacgtagtaaacagacaggatttcttcatccagtacacaacgagtcatcaactccgagatcagatcttctgaaccatcttcaggtacgaagaagttcagggactggccttggcaaatatgtttctgacgtaagctggcacgacgtaacaggactcgttgatccatttcaaatgcagtcttaaatacctgcttctcatggtcatcaagccagtcaacgtgttgtactgagcctacgtggttaatgatatcgttaatggtttctgctgagtacactccacgttcctgcatgagtttgtaaatctcaggcacgatacgactgagctgcccagcagcagagctggcttcaaataccattccaggatccgggaaccaggattcagatacaccacccattaacagggctgtgctcttggtaggtgcaatggctgtacggtgagtattacgtacaccatggccttcacaccattctggttcacccatgacttctgccatccactgagaagctttaaggctttcatcatggatatgcttgaagatctcttggtcgataaattgagcttccagtgactcgtatggaatacgcttcgactggaaataagtactgagtcccattacacccaagccaattgctcggcccttgatggtgaagtctcgtactttttctaagccaacaataccatcactaacttcaatgaactctgagcacaggcagtccaggaagatagtggaatagaatactgccttgctggttttaatcttatcccagtgaaccaggttcaatgaggacaggatacagctgtaggtcagatccttggatgaatgcagcatgatttcggtacacaggttgcttgccttaagcatcaggtcacggtctttgtacattgcaggacggtggcggttagccttgtcgatgaagtacagataacctttacctgtcagcattttgacatgcacagcatcttcgaatcgctggtttgcttctgcatcaccagctttcagtttctcaacgaaactatctttaatgatccagccataattcttaccattgggatcagttttcagtgagttaagacactcatagaaatccccatgctcgatatcgagataggcaccaacagaaccacgtctgttacccccctggcttaccttgctggtacaagtgaagaagtcatcaataacttccttagcaccattggcaatgccaccagtgctgatcttggcaccacgagggcgaatatccgagaagtctgctgaagtaccaaatccatatttggacaggattgcagtctctcttaaggctgagtagaagccatcaatactatctgctactacctgcccagaacaggacacaggcataccacggtcggttcctgtattagccagtgctggtgtagcgggtgacaagatgccattccacataagatcaaagaatgctttttcaagctcaccacgataaagctgtggtacatgacgtgccagagtatgtgcaatcttctggtgacgtgctcttaatgagccttcactttcgacgatgtacttactcttgaacatttgccatgcttgagttgtataccaatcagggagtaaaccctgtgcttgtaacttcttacgctcggcactaagtgcttcgaactcagtagcgactgaagtctctactcctgtaggtttaaacgacatgcttactctcctggtttcaataaagctgacagatcacgggcaccagatagctcagtagctaagttctggttaaagcccagtttatgcttggcccagttacgggtgtactgcaactgagtgccagcaaagaaatctgcaaacttataggaagacagggaggtatagaaccagctggagataacgcctgattcttgctcgaacatgttcggcatacccagacgattaagcaccacgttcacacgatcacgaatgaagtgctgcatttcttctttggttactacacggatggtttcaggagccttggcaaagatacgttcgatcatagcgaactcatgatcgtgaacatccttagccatcttccagatagcgtcggctaatgcttcctgtttggcttcatccatattgccagcttcaatacgttcttttttacaggtgttatgaagccaggaagagaacatgctgtggtagttctcatctttggctgaaccgtcgatacctgccacaaagtgagggatcaacttaaagccaggacggctgaacgatttgaagaatgcaaatgctgagaacagcatcacaccttcgaggaatgctaacgctgctgtagcttccagagcatcaccagaagacgcttgctcatcgatccatgcaatatgcttggacagatcttcatcacgcttccaggtggtgtagaactcgtctgtagccagatccaatgactgattaatcagatcatagaatggggcatgagagttcagctcaaccatagcgaatacagcacaggcacgttgaacatgaggacgagggaacagacgttgaatacgtccaccccacatctcttcaccaccgatcattaactcatactgagtcagaacagtttggagagtgaggataccttcacgttcaccttcagttagcttgttgtggaagtcaccaacgtcttcctctacacccagttcttcagcaggccagaagatagccatctggctagtggctgcttcgatagcttgggggtagtcgatgacgtaagactctgttggagtctcaatacgtgagagaggtttagtcataatttacccaaaagaatattgagttggttgaaaagggtagtgagcataactcacttccccggattctgtaatctggttatttaaccattatgacttggtgagtgctgcccagctaaccgggaacaaaggttccacaatagctgctacagcatgggccagatcctgaacttcctgctgtgcatgagaatcagaacgtttgttaaagaagttagcaaaggccagcaggttgcctgtccaaatccagttaaccatagcaccttgtggtaaaacaaagcgtgcttgctctggtgcaacaccatcttcgatcatgcgaagataagcagctactgctttatctgttaagcgtttgtattctgctttccaaatctcattatgaggatggataccagcactaccctgcttgattgaaccctctggtttctgacggaattcaggaatgaaaatctcaggagtaacactgatatagcgacgagattcctcattctcaaccagaccctgtttatgcttgaagcattgggtacggattgggatcggagccttcatacgcaatgtgattgcagtatgggcgaacggtgtccagtgagtagcttgatgtcgaatatcttcataaatctgaagtgccacagcaccacttgaaggcatcccacctaatgttccattttggatcatattgataattgcagctttatccttactggttacaccattagcgagaaaacggataagactggcatcctgttcaggagtagttacctttttcagggggccaaacgagatacgagcaacgtctaccacacgtttgtcatcacccatgtgatcgatgtattcagtgacttgttgagtcattttgagtcctcagttaattaagggcactatctgcccattgatcctaaaatagtttactatctagggaatctttctatagggggttacatatgagtaacactacgcaagttaacctttatctgaaaaaccctaacggaactccaatgactgatacttgtgttacagtcaagcctgtacgggcagggttctggtctggttttgcaggtattgttgaagatacggaaatggtatttaaaacagataaccaaggctatattgctatggctctgtggcctttaccgtatccctactatttaacatattcagacgacgatgagtccatgccagggcagtttttattttatgtccctgctgtggattatcctgttgcttttgaagacttgatcgtcactaaagctgattccaatgataagtatgctgatactattcttcagcaaattattgctgcaaaagtagctgctgtagaggctgcaagtgaagctgaaaccagcgctactgaagctgctggtcatgcaacagctgctgctgccagtgaggctacatccacttctaatgctcaggctacccaagctgatcgtgcccaggttaatcagctaatgactgatatgactgccctttgggcgagtctgcaagaagctattgttaaaattcaggctatcaacctacagaataagttaaaactgggtgggtatactctttgggtggacgccagtggtaaactccgtatctttgagggcaaccctacaagtgatactgatggtgtggttgttggtactcaaacggcttaaggtgactttatgactcgatataatggctgtggttgtggggggcat

SEQ ID NO: 60 - DNA, 177367 bp, unidentified
  source 1..177367: mol_type = genomic DNA
ttagtaatggctaaaaccatatgtaacatcaatcatgactttataacggcatacacgcatttttgcgttattgtaatccactgggatcgctaccacgtcagcaggatccacctttacctgaatgactctaccaacaccgcccccgtagtgtggaaggtatgatttagccgcaacgtgtaggccagtagaacaggtgcgcgttttatcttcgtctaccatgtttcgaggcatggagacagtcacaccaggactattatcaaatttgccagtagcgagatctttatagttatcgcgcacacgtttccaggcaaggaaacaaccatcatcggtcagttcaatgtcattatgtacaaggaacccataaagctggtatacagcatcgcgtgaagggtttcgcatcaaccgttcaaagaagttcaccagatgttcatacggacgatcgttatacatttcgcgaatgattcgttgagtgatatcagaatcaaacactacatctttatatagaagctgatgaccaatgattttaatgttgcctttgctataggttcggatcgcttcttgagtatccaaacaagttacagcacctttgacatcaccagctttcagcatttcatgcgctttcttaaagttcggatgtgtttcacccgccatgaaaacgcgcccttcgtatacaaccgtaatgaacgattcagatccgatcatacgcggtacagtgtctgatactttaggcgtttgttttacatcccttttcttagggaattccgctaacttgcggttgataacgcgcccaatggttcgggcgcttacgttgaactgttgggctagtgctgttttacttgcccccgtcaaccatccattatagatagctttctgttgtacttcgtcgagaattttgaccattatttccaccgtattaatttcttaaactcactgagattcttttcgttgttgtaaatcggacgaattgaataagaatcgctatgttcaacaagtgaagccagtaacgggtttagtgatttaaagatttcccatgcctgatcaacacgttttttcatattgctgcgtttaacgcgcattgatgctacggattcacgcagaatcggacaacgcaccctggaaagatttttaccatctttctcatacccttccagacacactatacgttcgagggtatcaacaatcttatacagtttttcattatatcggtttttcacaatccgatcaagcgatacaccgaaacggctatgcaatgcgtctgtttctgttgagtgatccttcccaatccatccaggcaagcaattatctttcaatgccttttcagatttaacatactgcttgcacagcatatcatcaaagcataccagatttgaatccgggatccacttccagaggctgttacgtatagcaaacacaacagggatcccagtatggcgcatgatacgcgataaagtagattctttcattgctgaatccatagacaacccggaattttcaccatctaagcggctatattcatcaataccatacaaccgaacacctggggctttatccagtgataaaaactctgattttgtcataaacagagaagtttttgccagattgccgttactatccaactcataacgatatacggtcggggtttttgggcgcggttctgaatttttcggtgcatatagcgcttttgatttttcgcgatctgcatcatagatctctttttcttttgtcatttcactggtacggagatacacaatttccgattcatcaaaatgacctttccgaacgatatcattaacaatctcacgctttgaatcactatcgtaatatgcaacaaagctaacacggcttaggttatgcattttagcatacccgacgatatacggtttaaccgtgttggtatccacttttaacagaatgagtttcttctgtttccacggataataaatgcgtgtgatgtcctggcgtttggttgtttctggcttatacttgctccagcggcctccgctaccagttacctgataccatgcatctttaccgtcgtattcgttcgcccaatacccagcaacataatcatcattatatttgtttggtttgactagttcgctatggatccagccaatagaatcaccattgatgcgaaaattagcatctttaccaacaaagttttgtaccattgaaggcagagaatggaaccacgtcagtttatcacgcacggtttgtaacttatcgaattctgatttaactcgattgaaatatacccggctgatttgtttcagacgttctttaacaatccctactgtcattttatccatactcaactcttcgcgagaaggcatgaaatcaagttcaccgatcgggaagtcaataatatacgtatactggctttctgtatagcaatagaacatcgaggtatcatacaaatctttatccagaggataaatgatgttacccatgcgagcatatacaccgctagtgtatgctgatttatgacggatcaccccgctatcgttggttgcttctttcggctgatagttgattttgagaatagaagcaccaacaaagttaggacgaatatcagtaaatgattcgtatacccttgctgcttcgttttcccattctttgatatcttcaaccttaacaggaacagtgatagtaaccccgttaggttcatcgctttcaatctcatacagaggatcgcagaaaggttccccatcatccatatagattgtgtaaccgcatttgataccgtcttttacggattccaccgtgaaagcatcggaatagcaaagcggagatttgcaacccagccccatagaaccgatcaggtcgtttgaatcatttttagttgattcgaagtaaacggtaaacgcatcactaacgaaatccggagacataccgatcccgtagtcacgaataacaaaacgaggatcaacagcagttggcaactggacatcaaacgggttctgatttcccgcttctttgtgtccatcgatcgcattacaagacagttcgcgaatgattgcgcggatcttgtatttgtatactgtcgaagaaaggatcttatacgctttcttgtttgcgcgtagagatagtttgtttcgtcccttgctggtatctgtaccaacacgatagatggtttgcggtgtatcttcgcgtaatttcattgtttatttctcacttaatattaaaaatgacttgatcacaagagtacttcgttggctttttgttcagaccatattccaccacttcgcaataagtgtcaaggaattttatcaatttttcttcgtcctctttttcctttttcatatcacggatacccatcacaatagcaatgatgatagaacagaagaatacacagatcccaaatatggtcagatattttcctaattttggtgaattataacgtgtcataccttacccctctttgcgaatatatgcaagttcttcatgggttactggacggatatacagacggccttttgtgtatgccttgcgcccactgatccaaatgtttttcatatccttaacaccgttcatcacatcgttgtaaaacttcttatcagctttagcctgatagacttcacggccttgataatctttcatgaacaaacagtaaaggatctcattcttatcaaccagattagcatcctttgtagttgttttactcggtgaaggtttagcacccagtcgcaaggccatagcttgccacactttaccatgttcataaccgcgcccgacaagagcatgagcgatttcatgtaaaagagtgtctaaaatatcctcgtagatatcttccgcaacatgacgaccagatagttcgatcagttttttggtataactgcaacggcccagagtttttgtaatgcgtccattgatccggaatgtccaaccattactgatcaaaccgtgtttttccatcatggtacgcgcccagtgggttacttccattgcactacgagttttcaacattttagaatctcctttgcttggtacaaaaccaatatagcaaaaagccccctgcattgcaagaggctttgtaattatttcaatttcttagaaagttcttttaaatcattgagatactcaattttaggggttgtttcttcccagtatttcaactgtttacgcaattcttcggcttcgtcttccagctttttgctttcgtccgtggttagatggtagatgttcatagccactaacatttcggcatgattctcgcaacctatccacgtagacacaaatttaaccgcttcgctgcgactaagaccacgtagagaatcaggagattctaccatttgagcaataaacgcaacctttgccagtgctttatctaacgcttccttagtttcctggatacgcttattgatacgctgttgatatacattcatacgaatatcaacgaaatcctttagaagcgtttcagggcgttcgtatgagtatagtttgccctcaaagataacgttaatgtttgggtttgaattttcaatcaacccgaaatcttttaggatcttttcgcgggttaacccgttggcatactctcgcttgagcgttacttcataacgaaaatcttctttcgatagatccttgtagctaacgataacgcctttttcttccagcttgtcaaggattgcaatgtatttcacacggtcatatttcactgggatctcggtgatcaccaatttggttttaccttgcaattcatacgtgccgtaaattgtaccgtctgtgatttcacctttaaagtaagggtatttcagatccagtgtgaaatctttatcattcagatatgcaatgcacccgttaacaaccgatttaggatcatgaggcggaatgtttgttgcatatgcttttgcaatcccgctaaacccgttaaccagtaccatcgggatgatcgggagatagtacgctggcggtacatgttccggatcttcatgaactggcgttaaatcaccatccatataaattgctttgaatattggcgatagtttgcacttgatgtaacgaggtgcgccaggtttcttaaccaaacgggaaccaaagaacccatcacggtcgaataacggaatgttattgcaccagtgcgccgccataagggataacgcttcttctacagaggtttccccgtggtgatacccatacatagcaacaccgccagcgatagaagctactttctgaaatcccgttccgccctgcatcgcagagtgaataaagaaacggtgaacgggtttaaacccgtctaccaggtgcgggatcgcacgtgaataaatcgtgtaaagggcaaacgttagcccttccacctgtacaacatctttaatacttctttccattagtcaaccttagaaaatttgtgttttccattaacccaatctttacgcggatcagattcgtcgccgaagcatagttctaacacttctttgtattcgtcgtcaagtacaatgacatcatacttcaactgatcacccagaacacggtcgtaatcttctttgcgtaaagaacccagccccttgatatatcgtacatcttttgctttatcgcggaacggcgcaaactcatcaagagaatagaaccatttttcctcgcgcccaactttagcgataacgatcggggttcgaatatatcggatccgtttctcagtgaacaaagaaggccaacggctaaagaatgcaagcaacagagttaaaatgtcgccgccgtcaacgtcagcatcgaccatgatgccgatattatcataagtcattccggaagtatcaccaggatgaatattgaggatagccattagctcaaacagttctttgtttttgataatgtctgtaaaactcataccccatgtattcagaggcttaccacgtagcgggaaagcgccttgtgtttcttcattacggcattcgatgaactgaccaacagcggaatcaccttctgtcagaaacaatgttgtttctaccccaggggtatcaataccggaagccggaacgtgtttagcaatttttgcctttttcgctttctttttcgctttggtgatcgcggcggcttctgctgcttgtttacgaatcaatgcggattcaatgatcggagtaatgatttctggggtatccataatcatttttgcgatctttttgtagttcaaattcgcatgattgttaaactcacctgctgtatttgctaatcgctcttttgtttggctatcgaatgcaggtgcattaaagttatgcaggaataccacaagagttaagcattcttttacacgtgctttcgggatctcgatactatgctttttcttgatcatcggttcaagttcagaatagataccatcaatcatacactcaacatgaacaccgccgtttttcgtatccagaccgttaacaaaggatttctgtttaaacccgtcctcagtgctcgccagaatgaagctgaggcgattatttgtctggacaatggttttatccccatacatggaagcgtacagcgggaagcgattagagagcgtttcgccgttatatgtgaatttcacagacgggaaagcaacggcaagggccattaagcgatccttaatcacttctttggtttcttcatcgataccagttacaccaaacatagagaagtctggagtaaacttaacagtagtaccctgttctttactggggctggttcggtaatcgatgttctgtgcgccgtccgtacagttaatggttactttgcgtttcccgtttgcagtctcgccaataaaaatcgagctataacagtttgtcaggaaagaaccaacaccattcatacccaacgttacgcggtttttatcatcgaagttagaacccgattttgccatagtccatgccgcaactggtttaggaactattttcccatctggggtttttacatcatcctggggaataccgcgcccgttatcagagattttaaccagattatgatcaatggttacatcaatcttattagcatgtttgaattcagttcggatcgcttcatcaatcgagttatcaaggatttcgttgatgattttaaccaacccttccacgtactcaaccttgcgatattggcccattatgaaacgttcatgcgcttctttgttaaccgatccgacgtacatatttggacgcaaccgaatatgatcgcgatcgctcatacaaaatgattcgtcaacctttgcgccttttttggctggttgtggtttctgttctggttcatcatctgccagaagaaaatctaaactcatattcacctctttgtttaatcactgacattatatagggttctatgaaaaagaaaacccctttcggggtttacttgttataagggaaaccatcacgaaccatttgaggtttatcaaccgttcgttttgcttcgcctccgcaatcacaatctttaggtgcatcacgggtagcaatgcttgccatttttggaaattctttattacacttggtgcatttataggtataggtaggcattaatagatctcttttaaacttaacatcttaactaaacgggctttgtctatgtcaaaaacacattgacgtgcgcccggatacaacttttcaacttcgtataccatgcagacgaaaccaacattgtgcatgtactcgcgttcatatgcattgaaccaacgagaaaggcgctgtattgactgaaaaccaaagtataacccagcctcttgaaagtctatattatctttttcaaggttgcgcatcaatcgattatcgtcatccggtgctggatgtcggttatcatccatatcaatatagatatcaggattcatacagaattgatccagccattcagcggtatccattgacacataacgattgacatatgggccgctttttgtttgccatttttctgtacaatcattccagaaagaacaagaaaattccacacgatatacgaacatgatataatcctcacaagtaaactcaaggtttacaagtacgataccacttatctaatttttctgcaagcatttcgttgataatttttgcaatttcgtaccgtccgtgagtagtacccagttccaggtaaatcacatcaagtgcgcacacaatcgcatcaatactttcttcaacgatattaccgccgcgttgaggctgaatgagacattcgctgatctcgccaacttccgctgataggtgatgaaccacatcactcttcgtgcgtttcttcactttatgagcgatttcaaaaaacttatcaagtacgatcgccgtttcttctcgcgttgcagtattctcggatgtcgtctccgtttgttgaacaacgtattttgtaaaatagttttcaaacacgttgaaagggatcacatgaggaacaccattcaaaaacaccccttctttacaaacataatggatttggcgcggaatagacaacccgccgctgcgttccaaatgtcgtttaacgcttgctacaaaatcgaactctttcccgtatccagccaacatactgtgatacgtgagtaggccaaatgcaggaacatagagatcattttctttatacagattcatttacaatacctttatggtagccaaaaatataacaatcaattgaaggacgttcaccagggaagtgaatgcattgcatgatgcgttcagccattagatcttctcccatgtataccgaagtagtttcttcgttgtaatgggtatcatacgacgttttaagcgtcatgcccggaagccctgcaatgtgcatgaatttagaattggtgcaaggttttcctacttcaccgttaatcatcaacactgcattagttttacgtgcttttctcatttgaatttcaccccgatttgcgatacgttccattcttttacttcatcaacaatatcataatggttgatgtatggtaaagcaatttttaaattactcgcgtcttgaatgttgcgtaagaaacgagtaggagaaagaagacacaaccgctcggatccgttgtttcctttagcggcaaatgatagggtttctcccccgtcaatcttcatatcaacagaaatcgttttgaattctggtgcatatgacgtgattttgccgttgtctctcggtgtactatagaaacatacactttgtgggacattataacggtctgtttcaatgtacatgtaatcgccgtcagccattccccacgcggtataaagggatccggtatagtcaccaaaggaatttttaaaatcttccttcgtggtgtatcccagcgagcgcaattgcataagctggttatgctgttcgattgcgtcggctttttgttgttcctgtacttgcgcatcaatcgtttcttgccaggaattatacgcatagtaacccacaacagcgattacagccataacccctacagctttccagattttagcgtcttcgtttttgttactcatgctatattccttttaagaaaaagggccgaagcccctttgttaacgaagataaaccacataaccgctttggtcaatcgcgcggtctgcgtcattgaagatattaccacgaatgccttttgctggtgctttccagcttgcaggtttcaggatattaccatcattatcgatgaaggcggcaacagaacgctgattgaacatttcaccagtttctttgttgcgagtatcctgaacaacgcgatgatatttgcggcctttctccagaaagaaaacagtttcgaaaggagaatcttggaaacgagcgttacgcgctttgtacattgcttccatgaaaggggctgctttttctgcgaggatttcgaaagtgttcatggtatatctcctaaagtgtgtttcgtttcgatgtaagtactatatcaaagatggttattctatgcaaggcttttttcgttatccatcaaatattttaagtgttcttttaatgcagggagttcgttcaaatggcgttgcttaactttctcgtactctttgcgttcccagttttcaagattgcttgccaacgcttcatcacaataagcgatcccgcgttctgcatcctgaactttctgtttccattgtgcaactgcttgttgataaagagaaccgttaaccatcataataatttcctcccttgtttcgatggggtaactataccaaagctaccccagaatgttttaacaaaaagtgctattagtaggtatccagtttatacattttgcaccagttcatgaattcttcgaaagtctgagtattaacacgtttttccttcttcactttcttagtgattacaggacggttagtaaaacgtttttgcattttcacagtgattgctactttatcgcccaggtcttctaccttttcaaccagcgcccactgagaaccaatttcagcaccgaaagttaaaccaacaatctcacctgctttaacgtgtgctgcatattttactttaaccattttcgtattcctttctctgtttcgtttcgatgaatacaagataccaaaaagcctcccgcaatgcaagaggctttttaacaaaaagtgctattttatttctttgagcaatttacggatcccaccgccctgtgtcttatcaaagattttctttgcatcaataacagaagtgattatgtggtagttgttcccttttccgtcaaactcaaactcgaccttgtagtcactacgaaatttcacaaaaacaaattcacctgcaaagtgcttacagaactgtttttcgttaatgtccaaccattcctgtgtatcatctaactgatacatgcgacaaaacaggatcgaacccattacaacaatcacgacaaggatagctaacgcaaattctgacatcatttacccctgtttactgattgacggtgtaacgatttaggcacaaccggatttcgatacggtttgactttatggatcatgggttcttcctcaaccaaattaggaaattggttgttccattccatcgaaaaaggataaggttgtgactttaactcttcgatcatacagtttactaaacggtcgccgattacacccaaagccgccccaataatcgctatacgcataaatcaccccttaattgtgtcaagtacagtaaaccagtcatgaagccatatcgttgttcttacagcgatatacgttaacaaactaatcaatgataccgctccgcaaatagccagcgtaatcaacagccggatttcaaatttagtaaaattcatatcaatctcctttctgagaacccaatataacaaaagccctcaaccgaagtcaagggctttgttttaaatttttaccagttttggcaatcgaagaactataccaggatggatcagacgtgcatccggaatagaatcacggttgattttagcgatatcaggccaaagttcaccaacaccatacagtttctttgctatagaatataggctatcacctggttgcacgacatagcgatcagattcaatcttaaccagatcctggttaatgatatcatcaaaggcttttgctttcgcttcgttaatcgtgttcccgtagtaatggcgatccataatagttaatgtgatcatcgtttctttcctatgctgttttcgtctgtctcttctaaggatggaggttcttccagccccagggcataacgtttagcatagattaacatcaatgcatctttagcgcaatcatgaatcgaatcatgctgaatgaatccatctaacatgcctttacgtagtggacacgtggtcactccgcgagtcagtaaacggttttcaatagctgtacgcacatcacggctattccagaacacggtcggcatatcttcaaacgtgtcaagtttccctgtcatagttcgtacaacatcggttagcatagaacgatcgaattcggggccgcgtgtataatcgtatgactgccaacgactcacaccgtcagccgctaaatcagcaaagaattgtcgatgaccttcgtacaaatccatgtcaatatcggaagggaacaaaaccctttgcgcttctttagattgctgtttccaccattcgatcgttttttcatctttgatgcgttctggttgtttccggatgtcaaatttgtactttcttcctttagcaatcagttcctgaaaggtaggcggatcataaggatcatcaacaaacggaacatagctaagttcagctagttttccttttggaaacgggccaatactttcataatcaaatacaaaatctacgggtaaatgactcattcgcgaccccgcttatacgattccatgaaataggccaatgatagcgcgacttccggagtaacatcaacggatttgatcatgtctggagttactgccatcatcccgaactgacgaagcccacaacgagcaatcgatttttccagtcggatcatgttttctacagcctctgcaaaattgtccagatgttcccaatcgtggtaatcttccattgtagaacgatcacttttcaaaatcagatcggcaacggattcagcataaaggcgcggaaggtgaatattcatttaaaacccctcaagcatgtttttgttttcacgaatgttacgacccattttcaaagtatcaatgatcactgcatactcttcaaaagtgaattcgatatcttgtgaaatgtttccccacgtgtaggtcggcccgttaggacagtataacccaacttctttgtttgcgttgacaatgcagcgcaattttgcaaacaacaaattgatatcgatagaattgaacccttcgagataatcaagcccctctctaccaatacggtcaacttctcgcaaaatcttttctacatctttgactttaacaataattttcataataacctcaaagggccgaagcccttagacataatcaacagtgaatcgtgcgcgggtagttcctacataaagcaactgcttacacaattcataatcggcgtatgcgtatgcatcgcgcgtatacatgtatgaatgatcatacgtgcttccctgacctttgtgatacgtacaaaccggaagcgccttaaccgtctggaacttgtttttgatttgccagaacgaataccagggggctttgtatccggtttcctgtttcatctttttatactgaaacgcgacgtagttcaaataatcgcctaaacgttcctgcataaccggatccgcgataacctgaatatccgctttcgtatcctcgaacatcgattctgttttcatcaagaaataatcgatttgtaccggatcacatcggtcagctttgatagtatcagaacgcgggatgatttcaaggattttaatttgctcgttgttgttatagataacttcaacaaacgaaaccccattcacacggccttctgtcactaacggttcttgcatcacaaccacttcaccaacaatgaacggctgatcagttttgtacaagtgtttgcggatcactgcatttaacttgtctacgtttgcgttagtgtaagcaaacatacggttattgttcaggtcatccggagtcttaacacggctaaaataacgtctcaggaagtcaccagcgttttcgtgcttcattacccctagttcaccattcatgaggggcattaacggcttaccgtcgcgtatagcgcgtgatacctggatgattgggtttccttctgcctgacgcataatcttatccatgcgaatgacatcaaaaatttcctcatcaaagaacggtgaaagctcggtgatcccttcggtattaaccggacggatctgatccttatcacccaatcccaggatcaccgcacaactcggaatagtacgcttgatgatacggaatagttctttgtcaaccatcgatacttcttcaaccacaaacacacgacattcagacagatcagcggcttttttgcctttttgctgttcaaatactcgtaactcttcgttggttacggggctgattttcagtgctgagtgaatggtcgttgcatccatacccaccgcctcagagagaacgtttttagcctggtgcgtcggtgctgtcaaccagatcccactaatacccagttttttcaatgtttcaaacacaaattttaccagagtagttttaccaacacccggcccacctgtgatagtagtatggattttgtttctgatatttttaatcactcgatcatgtgcatttttctggtcttcgctcagatcgtcaaaagttaattcgctcatactttaatcaataccccttgaatacttgcgtgttcaataaaccaacgcatatctttctttttcttttcggttacggtttcaacttcttcctttcgaaagaatcggctaagaccactttgtttaactggattcatcttatcatgatattctttgataatcgaatttttatactcgttagcatcgtccggagatagaaacaacaaaggtgttaactctccttccttaatgaagggaattttaaacccgtctttatccttactaacgacgatataatattttgtaatcattctcgcccctcataacaaacgtagaatattccaacaaaccaaaacactgatagtataatcagtaaaagttttctttcaacgccatttacgtgaaacacacaccaaccgaaaagatatgtgatcatcgcgcaaacaccataagaaagaaccccaacagctaatagcatcaaaaagtgccattgatcgatactataaatataataaaggagattatacatgatatcgaccgtaagcacaatagttgttcatgctcattatacaacaactcccgtatttgaaggagatatctacacgttcaaatacacttttcctatcgaacagatagttcaattaatgaaaaatagacatcctatcggatggattaccccagcaacaaaacatctactaaggaacaccatcgatggactaccgtaaaatttacaccaatcttatagaaaaagcaagagatagaacactaaattgttacacagaaaagcatcatatcatcccccgatgtatgggaggttgtgacgatcatgataatttagtagaacttaccgcagaagaacattatgtagcccatcaacttcttgtcaagatgtatccacacaataataagttgatatatgctgctaatatgatgtgcgtcaacgcaacacagagaaataataaagcatatggatggatccgcagaaagtggatatctcagatatcaaaagacaggacagggacaaaggcaacagaagaacaacgcaaaaagatgtcagaatcccataggggagacaaaaactctatgtatgggttacgcggtgataatcatcctgcttatggtcaaaaaccctggagaaatcaaataacaatgaaaggaaagcatgaatggaggtatgctgggattttctatgactggtatattaacgatattaaagctggaatctataaaagacaaggacacaagagaatgctacaagaattgcaaattgcaacaatctcccgtgttcctagaacatcaatcgagttattcaaaaaggggtggaacccttacgaagataccgattgggttgagtgggctaataatcaatagctgttggcccaacgacgaagattttcggcttgtttaagagcgtacatcttataaattgtttctgcatccatacccaatgcaataaacttacatagtacaaagtggaattggtcgatcatttcaaacagaacttctaaacgatcctcttcactcagatccgcaaatttagtattgcgcaattcctggtgatttgctttccacggtttccaaacaccggaagcaggtttaacaccgcgagacattccacccagagcggtatacaattcgcgggtttcatcggcgatcgcgtcgtcttgcagtttcagccaatcaaggatttctccacaagtttccagattatccggacgcggaacccaatgcagggtatcagacaggctttgttgtgcatggttttgtaaatccagcatggattgtaaaggatcgccattacgggccagaaccttttgatattcggaatctacaaattccagatcttccgggttaaccaggtgcgcacatgaattaaatacaggagttttatcagtagtcatatcaatctcattttttcggtgatttgtcccacgacttaaatcgaagttttgccgtgagtccagaaacagtattatctttcaaatactgcataatttcaagtttagttgcgccgtccgtttttatcatttcgttgatatctttggaaggccacgggcatttatcccacattacaaccttttctccagcctcaatcaatttaaagaggcggtgagtagtatccggatgacgtgcttcattgtcaagaacccagacacgcatatttttatacggaacctcagaaagtgcaagctgtccaccagtgatagcgccagcattatcaacaaacaggctatctaatggcccctcaagaagataaaccgtttttagcggatctatcgtatcctgtccgtaaatcttggttgattcttcacaggctttgattgtgatatatttcgactttgccccgtcgcgtaaagcacgaccctggaaagattcaattttccctttcttatcgaagatagggatcactaatctcggttctggttttgcgatcggataggtatccggattcaccgtattaaccagttgttgccattcgcgagtaaaccacaaccgatcccacttgtcacggggaatacaacgattctgcacatattttatgatcggatgttcatccggcaaggtatctaacctttcgcagaattgaagagtaggaataaatttcttctcttcctttggtggttctgtatgtgttggctttaacgaattgcgatccttaaacgattccatgagataatcacggtaatcgtctggataatattctttcaggaatacgctaaacggcacaccataaccacagttaaaacaaccacaattcatatgatcaccctttttagaagggtagatccaaaatcgttttttgtacttgtctttcattgagtcgccgcaaatagggcaacgcgcattgatgcttaatgcccctgatttacgaacgatttcgctttgaggcagtgatcccatgattcgggttgcaaattctatatcaagatacatttcttacctcagttgactatctttagatcctcgtcgattataccccgcgctgatcatttcgtcatgttctttttggcattcaatacaataacggcaacccttcacgatagccctacgtttttcgggtatcggatccccacaatcaaaacaatgcgttaatgattctccgtttctgatttgagaacgtgcaaaatctatcgcattgtctattgttgcctgaatggtatcttgaacaccgtcagcagggccaaatccaaccgccattgtaaatcctcctaatcaaatgatttcaatatcatagactaagaggatttttctgtcaagaacttacttgcttttctgttccgtcaagcattaacttccaaccacgaaacgcctgtttaaacgaataatttattgcaatatcaattttatcagaaccttttcgacgattctgataaacggtcgcgttgtcactcatatacatgatacaaattggaaaccatgtataatcgttagcagtagcccagatagtgatattcagcggaggaattatcatttctttttccttttccctgcacgggtaacgcctaatactttcggcccgatgttggttactgctccagtagtcacaccagaagcaatcttttctgtatcgccgccagaatcacccgcgaccatatcctctaacatgcgccccttatcataatattctttgaggcgtggaacattcaacatgatttcttcatgctcttgttctgtcagattgtagcgattgcgtagggtatcatatgaactggttaagttcataaacccactcatatacggaacagcattcattctacgcttgatatggcgtactgaacgatgaaaaggagaatacgcttctaactcttcttttgttttggggttgcgaattacttcgccttgtccatcaaggatccccagcttgtaagcagaccactctgtgaatggttttttcagtaaacgaatcattcgcacactgtatgttaaatccatattacgaatcatttgatcactcatgatgatctcctttctaaattagtattacgttttatttgttctgttacaactgcttggtgtgcttcttcgggagtaggaaataatcccaaatttatctttttcccttcaactgtgattctgcctctccataacacaccttttgttttcgtttcatgtttggatacaccgatgtaaccgctagagttagtagatggtgcttttctgtttatcgcattcagagattgtgttagttctcttaaattactgataccgtcaccaaattcaaccccacgcacatgatctactatttcaggtagatatccatgaacatagtaaaatattagtctatgtcttctgtactgttcattgttaaattttataacgtgatacccctttgcattggggctaccagcaacatcaccaggctttatctttcgttggttagagttaggagttttccatagcacaattcccttttccgtattaatagacagattagggattaacagatctaatcctttcttttcttcgtcaagggttcgttttccactaccgtaacttttttgcatgattattactctattgtgaaagtgaataaatcagatttggtttcaggttcaaactccatacaaacaacctcgcatagtggtttaacccctttccaatcctccaggtaatacccagtatctataccgcatccaggattcataacgaggccagtttcatcaagaaactttttgcatttacttgatgtggtgctgtcatcttgtcggaaacagtgtgttttcgaataccggaaatttgcagacatttgagggattatgaaagttccctgacgtgcgatctgtgatgcacgttcgattactttatactcaaattctgcccctgtatacttacccttaaaatcagaggttttgattttaccaaaaggcggattactgatcgccatatcaaacacctgattaaattcagttgttaaggcgtctccatgcacccaggaggcttctggtacgatacgcttacctaactcatagtatgtgtgatttaactcaacacagacgatttcacgcggcgtattgtacatcatgtaatgaaccatagcgaaagataacccaccgataccagcacacaggtcaataacacttccacctgtgcaagcatcgattgtgaaatcgcgagcaagtccaataggggtaaagaacgcccctaattcagaattgtttgtaaacgcgccttcatgaaagttttcgataatgaacaacttctcttcgtaagttagcgctttgtcagagtgaaccagatccattatctgattgtgtttcttggtttccgctttcgttaactttgccattttcccagctatacaataatgttgattcgttagggtagaattcccatccgtctacatatccggtttcccaatcagtagtttgttcaaaaccacagatccattcatatacaccaggaggcatttcgacggaatcaggaagcccgatatcttccgcgctgcgtccacattcaaagaatgcatcatgaatgaatggtcgagataataccgtaacataaccttcatcgtcaacagctacgatccagcgggaactatgaggactatcgaacttcggttcttcttcgtctgcgtcagcttttatttcagccttacaaaaatctaaattcatcatttcaaaccctctttaacaccctctttcatagctttccaggtagaacctgcttcaccattcagggcggcaaatacaaataataagatagcaaggacaagattcacgccagcaatcaccatgattttgctatacacgaaaatgtaaggcattgccaccacccaccaactaaaagaattaccagttacgatgttgagtgctgcaagtaagaaagtgataacgaatgcgattttcataatgtcctcctttgttatgattaaggtatcatcttttttgaaagaatgcaatacctatagatacaaaaaagccccgaaaggggcttaattttttatgcgttattgatgagataccgaagaacgtttttcgcttgttcctcattacaaccaactttgaaaccaggttcgatagggaggaagttccagaggaaatcaacacttccttcaacgtcatctttgcctttttccagcatcgctaacagcaaacctttgtttttgatgctgtttacgattgcgtcaaaataaccatcgctgaaatcaacattcgggttcagcatttcgttgtaagggttgttgaatacgttcattttgaatctcctttgtttaactcagtatcttgtctacgtgagttatattaccacaatggagattcaggtcaatacctttttacgattttttgaaaagtttttcgtatttggcttttacccagcgatacatatcttcggccttgtcactggcaagcagtgagaacagcagatagatcgcagcacccaccaacacaacgcctactacaatgtagacgggtaagagaactgggaagagaacccagaaccatgacatttgcgagaagccaaacactttagcggctgcaaaaatcagagttagtccagtcagcagtttgatagccggaataggaatcgttatagtcttagtcatttcattaccttacattctttatggggctattcgccccagtcaattaaaattgaatgtcagattttgcaatctgtgtcattttatcacgtcgggtagattcagcctgtttaatcatcgggccttgtgtctgttctactgttttaggcatagtgttgccgtggtagtcagatttaaacccgtattcgctgttgtcggtatccatccagcgctgattaccctttcgaacttccaacttgaacttgttgaaagtgttcttatcgccataacgggatttgatttgcttgaacagttgcataccctgatcagctaactcttccgtctcgattacagctaacataaaatcagccgtagcaggtaaaccagcggattccgcaacatcacccatactcacatccgaactatcccatgcagaacgcccaacctgtgcgcctgtccacattacggtattagtttcaacagcaagaccgcgtagttcttcggcaattgctttaaccagaatataggtattctcagcacctttaacacgggttgaagtacagatccccaggtaatcgacaatgatcacatccggaacaaactgtttcttcaatttaagctctttcacaagcgctctaaagtggtttgcacctgcacccgatgtagggtactgcttgaccaccaaacgcccaaccttacccgctttaaggcgctccattttgttcttatagtctgcgtatgtaatgttaccttcgtcgatgtcatccatagtcacatcaagaaggttagcatcgatacgcttagagcaaacatgctctgccatttccatagaaatgtaaagaacgtttttaccctgttgcagataatcagccgcaagagaacataaacccagtgatttaccaacgttaacaccagccatgatgatattcagtgtaccacgttccgcgccgcctttggtgattgcgttcaggatcgggataccaaacggaattttcatcgccttcgattggtaaagcatccaccgtttttcataatcttcgaaatagtcatgacctactgaactatcgaatgaaattgctaatgcttcctccatgatttcagggatagccccaacaccaggaagtttcttgttctgttctgccagtggtttttctgcgttagcctggatctcgattgcgcgagaaagagcacgatacattgctttgtctttgcaatatgtttccgtttccttcattagccaatctaaatcttctggcgcatttttcagcgactgaatcgcctttttcgtgtcttcgtagactacatcacttagatttcgtttgtcaagcgcaacctctaaagcagtttttgacggaataccgttgaattcctgtacatgtttatcaatgaggtcaaacaaaacttgtgcattgccttcaaaatattcctttttcagatgaggccatgcttggacaaaatacgtcccgttataaatcaggttagaaaatattgtatcaacgatcattgtattgccttataccaggttgctgaacatcatgaaaaagttgtaaaccttttgtttgaatacatcccataatgtcagcttaggctttgggacaactgaacccttttcaagctctttaatctgtgcataaattgcatcatgcaccagcgggatcaacgcttctttgtcttcgtctggggtactgaattctactttcagaccatgatcccaaaacaccttatgaatataaaccagatgcgcaacacctttttcatcgttaatcagaagttcctgaataacatctttcatcgcttcatcaatataattctttgctttgctctcgatatccatacattgcctcggttatggggccgaagccccatagtttttataaaatttcgttgtcttcttcgatatcatcaaatgattctgggatatcgtcatcatccagatcaggatctgggatgctatcagtgctgtataaatcttccagcgcggaaccatcactgatttcacgatcagggatcttatacttttcttcgatagctttcaagaatggttgatgagtaaacagaggacgccagaattcaacgctatttgtttctgactcacgccatttcttttcttcaacttcgagttcgccagtctcggtattcaggaaagcgcggttgcgccagcctttggttacggtctgtacaaagttcatttccattgccagatccaaaaggccagaatacatactaataccgccttcataggtaacatgcagcgggaattttgatttctctttcacgaatcgagatttttcgatgttcatgatgaaatcataacccactacctcagtaccttctttcacctgttgtttacccaggatgatcgcggtatcagcggaatacattaaaccagtaccaccggaaataactttcttgctgtacatttcttgtgtgtcataggtatgacagatacaaaccatcgggatatccaggtcagccaaataaggcgtaaccatacggaacatgccttttaatgcttttgctcgcgtcatatcctgtttatcgttatcagacagcgcgtcagcaagttcttttttacttgccgtgttgcctactgagtcaacgaatacaatcaccttatcaccgcgttcaagcgcgttaagctggcttacaacgtcattacgcaactgctcgaccgtcgtgatacgagtatacacaacacgatccggatcaacacccattgatttcagataggatttagtaacacctttttctgaatcgtagaacaggcacacagcatcttcatacgttttgagataagccgctacagtcagcaaacctaagttggatttgaagtgtttggacgggccagcgaaaagggtaagaccagaagttaggccaccgttaaacgcaccggacaacgccagattcagaatcggcacacgggttcgcgtgatggtaatattgttgaatacgtcgctttcagaaagtacagatgcagtttggctattcgagtttttgatcagtttttttagtagtgctttgtttgacatttaatttttccgatttattcattctcattctatatatctcactagttaatgaaaggggccgaagcccctagagtttaccagtcaccgaacagatcgtttaaactggcacgtttttcataatcaattttacatacttctgtgatgttagtcaatggactaataacatgtttttcaaacatacccggataatctacccatgccagaatatcactttcgatctctgctggtagtctatttccagattgccacgcgatgcaatcagcttgccacgggtttttatcccttaatggtagaaccattaccttttcaccttccatgattggtgtaacaccatcaataccagcagtgaaacggttaaagaacaacacccctttaatatggtttggtgttcccttgattggatagccagccccatcacgatatttcgaaatgttgttggcagatgatacaccagcaatttccctgtagtcaagttccttatattcttcttcgaactttttataatgttcgtgtaaagataattcaccttcttgcaggatacggcggatcgcttctttcaggaatactttcacagaggtcggagtactcgaacgctgtgtttccatacccatgattttcaatttcggtttttcatagcgagttccttcggagtcccacacgttagccgcatatcgttttttagcagtccagaaacttcccaacccttcggaacccaacggaggcccagaaatgatttcacgatccataaacatcaggtgttccacgttgttcatgtattcgcaaagttcacgataccctttatcgatcattggttccattctttctttagcaaagcgatccaggaagtcaacccaatggttattatccttaaatttagcctcaccaccaacttttgcaatcacgttatccatacaaacataaatggagtcagtatcacagtatcgaacatatgcatgatccgtagtaccgcacaggtcgttaagatattcgtttaccttacgttcaatccactggatagccaactgcccaaacatggtgatcgcgctggcgtttcgtagatcgaagtatcggaagtgttcgttacccaacgcaccataaagggagttgatagaaatcttacggttaagctgtgctgtgttcgcttgtgcgatcttcttctcacatacgcgcttaactgctttaagcatttgttttgtaagagttttcagaactgctttcgattcatcactgaaatctgtatagaaatcaaagtcaggatcgatcatttggttatgtgcgtctgttaagtgttcgagttcgtgcttgatgagttcaagatttcgctcacccgccatcattctttttttccacatcttacgctgatcaaatactttcttgatctctacggggatcacgcctttgatatcacggcggaacatccacccgttaggagaacagctaaattcatcgctagggcgcggcgcggtcttattaatatactcttcaagagcacgtaccgcaaaacttcccataatcgtttcagggcttatattcacctgtcggatgatggaagggtacaggcttgttaagtcaaacgataccatgtatttgtaaggcccaggaactggatccttcacaaatgccccagggtaaggggttttagtatggcgtctgttttccggaataacaaccttatcttcacgcagagagttataaatgatcgcgtcccacgttttcagcggagacataacccctgggaagttaatttttgcatagtacgctacagacagaaccagttcaataaagtttcgtttaccgtcgatatcaagtacgcggataacgtcaacaatgttgtacgtgatgtacagttggtgatcgcgctggcgtagttcagacagggaaccttcatactcaactttatttttaccagtttcgtattccgcgatcgcgtccaggcggtaagatggttgcggggtaaagctgaatttcttatacagcgccataccatccatttgagcaacgccggaaatatcatatcctaattgttcgttgccgtaagcgtcagtagtggttctggcggttactttaccaaatgggctaaaatgccttaccacgttttgaccgaaaatgttcaggtatcgcgtgatgatatatgcaatatcgaatttgtcagagttccatccggttacaataacaggggttcgctctttccaatctttgatatacgcagacaataacgacttctcggtctggaaagaccgataaacaattttgtttaaatcttcttcgctaatgtctttgcgatcaacgttttccgcgcaccattccgcaaggccaccctcaaccagatcgtatacatagaatttatcttcaatgctatcgtaatgggtaatcgcatcgattggatattttgcttcacgtggatccggaaattctggagcggtcacctcgatatcgatagaagcaatgcgaatatgttcgcggttgtattcgatttcattacggtacatgtcagaaatgtaagccagtcggtaatcatccatacctagcgcttccatcccaacatcgcgcatacgctgcatccagtttttagcttctttgatgctgtcaaactgttttttgaggcaaggcttgccgtaaatgtctttgtatggggtttctacgccattcatagcgtgttgatacattacgggcgcatatttcgtcttacgtacctgttcggtgccgttagagtcaacgaagcgctcataaatggtatctcccatttgttcaactgataggtaaaattcattcattggatcttgtcttctccattaatataatgttccattgtaacaccacctacagcaaattcaagtttactcgatgttctaaaaccaacaaaccttctgctaacaagtcacggatctttctcagttgaacaagctggcgttcaagtttaaacccgtcgaataacatgctgaaaatactggaattgacactatgatattttgcttctgcaattccctggttaaccatcatgatagctttgttaaccattagtttcctttccgttactgtatgttcatccagttgacaggttgcgagggaaaccaaatcatcataagcacgttggtcaataacgttatccatacgggccgcgaaaatcttattcatgtaagtgcggatcattgcgcgtcctccattcttttcataaagacttcttttgcttgttggatcaagtccagagattttttaatacgctcatagaaatgagtggtttcaacttgattgcataacaatgtgtactctgaaatgttacgatcgtaaaatccaggaaagtagtgttgtgcatagctgtaagtgcgggtatctgacagattgcaagttaacgataacaagatgtcatcttttacaatcgggatgatcaaagtttcgttggatttgattgaatccatgatttcgttaatagtcataatatatccctctcaatggtgtacacccaatataacaaagcccctgcacgaatgcaagggctttttgattagtgaccgatccggtacttgtacttgaggatccaatctgctttttgcgagtgagtcagtacgcggaagttgttttcttctgcaaacttcaacccagtggttacaatcttaaccatgccccactcttcgagaagtcgcgcaatgttgttccggcgtagttcgtcttcttccgtcatatcgacttgacgaccatcgagtttcaacagttctttaaaatgcacgataaaatacttaccttgctttttcagaatgtggcacgattgccagagcattttctttttgttgtttgcaataccaatacgggttagcgtttcacggatctttaaaaaagaatcgtcgctgattagttgaatttctaacatacatcaccattgtttaatcaatttttccaatttcttttgttcagctttgtttttcacaatacccaacaaagacagagcgacctttgcgtgttttcttttccaatcctcgaacattccgaggtctttaagttcctgcaaatattccatcgctgtacgtgtatttacactgtatttttcgcgaagaatttcgataataattttctcttcaaaatcttccgatagtttagcccatgcaccgaagcgtttagccttcctaacagagttgagataatagttatagtgcatttggtcagagatactaccgcctaccagattcatcacatacgcgttgtatatcgtgtctatgtgctggctcattgcgttgtctacaaagtacttatcatacacttcatcgataaccagcggcgttttaccgttgttgatttcgtctatgatgttaaacaaggtgttttctttatccttgccgtactctttgaccagttcttcaaccttatcccaatctttagaaagccaagcggattcatgcggggataactcttcttcatccagaaattccgccaggctcatgattatgcctcccagaccatagaaagcatcaggttcatcaacagatattgcagatgaatttctttattcatcgccagcccgtattgcgcgttgttttcgcctacaatctggatcagtgcgattttagaatcctgattcacgataggataaatcgtatcagtcaattttccgataaaggtatcgtattctgacgcatatttaataacctcagagcgcaaccctttatagttcttttctttcaacagggtaatgatatgagacacatcagaaccaacgatctcatttaggatcccagcatcaatttcaccacgtttcgagtagaacccgatcgctttgataatagaacgcgcatccggataatgctctttaacaaacgctgcaatgactttagggtcatacttgatattctcgatttcaaggataccgaaacaacgcttgattaactgtttcatcagttcgatacgttcagcatcagacggaacaccgaatttaacaggaggacaacgagaaagcagagcactatgcacaccgttaatgttgttcgccgttacaatcacagaaacgtttttactgtatgcttcgataaagctacgcaagtgtttctgtgcttccgccataccagaacgatcgaattcatcaatgatgataatctttccgcctggtttctgcgtcattgatgaagcaaaacgatccagttcattacgaatgaagtttacaccacagttcgaaccgttgacaaagaacacctcagcatcaacctcacgggccaacacaagcgcgagggtcgttttaccagtgccaggggaatcagatacaagggtcatgttctcaacacgcccagatttgattatgccccgcatagcggctttgtcaccagaaggtaaaatacactcttcaatcgttgttgggcgatagcgctgatcccatgcaaattcatcaggagatcgggagattttaccgtatttggtttcgatgatttcaatattttcactaagttccataatataccttcaaaataaatggtgtaaaagaaaggggccgtagccccttaaaactatcttacttgaatgtgctacttgcttcaagtacgacgacgtaagcaacgccgttatcagaagagaattttgcggcccctttggaggaaatctctactttgtaatcgctgttgatgaactgcatgttatcaatcttcatatcaaaattgaaaacattgtcgccttcatactcaccgacttcaacagagaaagttgattgactttctttgcttttcgcggtaatgaccagtttaccatcaatcggttcaacggacaggtcggtcagtttcatcatgcgagacgctttgatcagtttttcgaaatcgttagcggtaatctggaaaatcagatctgctactggcatcaccagacgttttttcggtttcgggatcgttgttgcgtctgctgaacgttcgatgatcttcatcttgtcgccgcgaatcacgatttcaccagtggaaatatcatgagtgatttccgcgtcagtgccgacgatgttcagcatgttcaggaatgagttgagatcgtagataccaacatcttcatcaatcacatcagcaatttcagcttctgcgtatacaacgctgttgattgatttcgtcatgatgaatgaacctttggtcaacatgatcgaagagttgatttgagaaaagtttttcaggatatcaatagtttgtttagagaatttcatattcagcctttagttttcaataagtgttacttaataagtgattttacaacggtttccgctgctgtgtcaagcatatcagccatttctttaacggttgtacgcttcggatcttcgcgtcgttcgctggtaagtttacgatgttccgcaaccactttttcatcaatgtcacgatagtgtttaaaacgttcctcttgaggcatagctttaaacagttcttttgtttcgtccgagagtttagcaacccaagatttacggacgcggttcatgtagtcaacaaaaacattactttcattcatatatttcttctctaacttagaattctttgagtgggggccgaagcccccgcttgtattacatgtctaacagtttatccaggtcatcatcaccggagctatcagaatcatccagatcgaacggtacgccgtcatcttcgcctaccggaaccgatgcaacaccaccagatgatttcacatcagatgtctgattgtcaaacttagccatttcgttatcgaagttgctcagttcgctatcaaggtcagcggaagcgctggaaccagcagaaccgatcgaactacccataactttattgaagcgagtggtcaggtcagccagcggtttaaattcgctttcagcggtaatcgggcggagatcgctcataccttcgaaaattgctttctgaacttcttcatcgtcgatgtttttgatcttagccggaacaccaaacgaactatcgtcatagttaggccaatcaccaacttttttcgctttcagggtgaagttagcaccatcaaacggacaggttacagcaatacccggttcatcaagttctggattaccgttaattgcggcggtgatcttgtccatgattttcttaccgaagcggtatttgaacaccttaccttcgttttctggagcgcctgggtctttaacgatcaggacgttagcccagaaactttgtttacgaccgatctggctcagtagcttatcttctggcccgtttttgttggctttagccttctcatacagatcgttttcggaaatgtacttacatgcaggacagccgtcataatcgccgtgggtagaggaacagttctcaatgtaccactggttgtttttcttgaaagagtggctcacgatacggacgaacgccagttcatcatcggaacgtgctgggaggaatcgaataacggcggaaccgtttttctgtgcgtccagggtcagtttccattctttctcatctttctggaagccggaaccacctttcagatttgctacctgtgcctggagtttagcgggatcttgacgtttaaaaatgctgctcatattctgttttctcgtttagtttagtttgattaacgtttgtttcattaagtttcgatattttatgatatctttttcagtaaggtcaaatatttttctgtatgcctttaacttaatgctaaagtcagaccaaataatatcatcagctacttgatcgtgtttatttatgatacctaaaaatgagtcaaaaatcaaaaacgattcgtaagatatcacatttgacaggacaagtttgcttatgtaggacgttgatgatttttcgctgtacttgaacaccagagacacggggatctctttcattttggcgaattcgtacacgtttttaacgtcatccacaaacacgttatctagtctttgtaactttcctatgtactgcctgtaaaagacaatactatcttcatcaacatcgcctacccagaaatccggattggctacgaagttggataggaatataaaatagatttctttgaatgtaaagcgttgagctaattttacaaagaaatatctatcctttcgcttgttaaaggcgttttcactaactttgatctgccagttgtattgaaggacatcaaaacgcccctggaaatgagttttcatcgccagatataacttgtatacagacaaaggcacaagccgtgaattcgcctcactatcagcaaacggagctttaaatctcacatgaagccgtccagagtggttgatgaactatgttcaagcgcaaccgatgggcgaagcatgtttcctttgatcgcttcgtcgctaatcttatcaaggatcgcgcgaggaaccgttttattcagcatcgcataatcaatggaattttcatccatccattgtagcgttgcttctatgtaggttgccccctcagaggcaaccaaattttcgatatacaaaccgacttcggttttatttccgatcatgctttacgccttatcgatcatatcatacagttcgatcagttcgttgttttcttcttcgaaagcggtacgggcctgttcgtgatacagtttgaacagcttcccgaaggtttttccgtcgataccgaaatcagtttttgctttggatttgatatccttgaacgtaccgttgaagatctcaacttgagttttcacgttggatgcttctttgatcagttcttttacctgttttgctacatcagggtttgtttgtaaaaattctacactcattttgttacctcaaaaatcactcagtttttcgaacatacgggaaagtttgttatccatgaagtaacgttccattttggctttacttccggattttggagtattatacgcttcaataatcgaattttcaatatcttttggtataaattcgaaatcgcgtagttcctcgttttctttgtaacgtgcggcccattcaggggtcatcaacgttgtagggtcgtctgcctccagccatgcctctaactcagaggattttaccgctggggcgcgttcgccttcaaccttcgtcacaatataatcatttctaattttaatgcaagcgatactatcttttttatcgcctttgatatttttgtatcgcagatcgttacgtggtgaaccgtgcttaggcgttacccattttttctggggaggcgaccattgacgaacaccgttatatttctgtagttgtgtaaagtcgctatcagcagaaaccactaatactcgtctaccttcaccaacagcttttttcgtaacaacagcaattatatcatcagcttccgcgaattcaacctttaatccaagataaggcatattctgacggatttcttcgaacactgggttcaggaagttgttcagacgatcccaatcccattctgattcttcatgttcgatctgacgacgttttttgtagtaccaggccttttgcctacgccagtaatttctgtcatcgaaggcaatcacgatttctggatactcacctttaaattttacaacgttaaaccgtaaagtgtcaagcaccagatgacgaatcatttcgatcgtgatggatgcttgttcctttggtttgaagttgttcattagtgtagcgatggaaatgttagagatatcgatgaccatagtatcatcgggttccccttcatcttgcatcaacttgttcaagttaaacatgcttgcaaaactgctcatatatacctcaatttttcaaagaacggggttattgtagtaacttacgaaatgaagtcaataaaaaagaccataaaatttttgatcaataatacttgatctgatcaaatttatgatctataatttattaattaataattattttactacaatgatcattgtaggtcaagtactaaaatcaataaattttatataatttagatctgatctatagatcattagatctactttaaccttaaataatatagaatgaaatttgattttgtctacagttattatataatattcttaacttcaaagaggaaatatgaatactatgactaaagaaacaaccaatatctacgcagacaatgaaaaattataccctatcctctgtgcatggaaaaagcaaatcgccgaaacaggtgatcgcaaaatgcctaatgagttaggtgctgctattatggatattgcaaacgggctatcacgtcgttacaacttcaaccgttattccgaagattggaaaatggatatgattgatgacggaatttccgctgcaatctcaggactgcataacttcgatgaaactcgttataccaacgtttacggttacattaacaaagcatgttggcaagcattcgtaacacgtattctgtacgagaaaaaagagaacgcgaagaaatataaattcttccttgagcacgtttacgactgcgaagattcggatatggttagtattgcagacgaaggtttcattcaagatctacatgacaaactatctcagtacgaggcttccgccaccaaaaccaaagacaaggaagcggaagtattcccaacattggaagattttctatgaaagcaataattgacttaaacaaaatattaactgatatcgattacgaaattgacttgctaccctacttcgtaaaattagagttgcaaaacgtgggaatcccggttatcatcgatccaactgacgtaagaaactccgatttcgaagtagaagaaggggttttgtcttatatgataaacgccgaaactatgatcatggagatcacttatgattgatgaagagaaagaagtactaaccagtgtggaagaagtggatccggaagaggaaattcgacaaaagatccaggcacgtgtagaagccgacgcattgaagcgagcacaaaaattcattaagaagaaccggactgagatcaaacgcctccgtagacacgcagaggaagccctattcaggggtaataaggttcagtatgtgtatgcggttaagaaactccgtgatatgctcaaacagccgtatacagaggatttcattgatacgatgtggaacacttcactagcatcaattcgaaatattgtagcttcacaacagaagcactaacaaacaagtagccccgaaaggggctatgagggtcttatgagaaagtacttaatgatcggggatactcacgctggcttgcgtcaggacaacccctggaatgaagaaaacctatacaatgtattcgtgcaaatcgtagaacactgcaaagcaaacggcattaccgaggctttccatgctggtgatttctttgatgtgcgaaaggccaccacacaaaccacgatgaaattcattcgtgaacgtattgtgccactactggaagaagccggattacatatctatgttctggttgggaaccacgattgccagtttaaagacaagatccgccctaactcgccgcgagagattcttgatcagtatgattgctttactgttgttgatgaaccgatgacagtaaatcttgatacttctccactacaatcaatcgatttgatcccgtggatttgtcaagaaaacacacagcagatttttgatttcatcaaaaagtcaaaatctcaatactgcttaggacactttgaactgtccggatattatttctataagaacagtaaagcggatcatgggcttgaacctgatttcttaaagaaatatgacatcgtgtattcaggccactatcatcacgctaacgaaggcgctaacgttttctatatcggcacaccgcttaccatgagcgcgaacgatgaggacgaaaccaggggcttctatgagctatcttatggcgatggtaaacgtgaattaactttcattgctaacccagtgtgccaccatcgccggatcacttatccggatcaaaaagatgttgatgttgctgattacaaaaattgctctgttcgtttgattgtacgcgaagttgataacgatttgcctaagtttcaaacaaaactggaagaaacagtttatgagttgaacattgtcgatcgcgtgatcacagattcagaagttgatactgactttgaaatcaaaagtgtatctggattgattagtgagtacatcaacaacatgcagatcactccagaagaaaagaccgaagtatctgcaataatgagtgcattgtatgcagaggttacgagcaatggaaatagttgattacgttaatattttaaacgaagaagggcgatataaagccctttataaaatgtttggatttgatgtgattgttgcagtacagcaggattcctataacgagtatgtgtcattggggttcactctgattaaagacaactatcacgaaacaaaggtttggacatttactgtcctgaatagcatggatgaagattccgtgatatactgctttgatagcacgattacaaacatgattagtgatatatcccaaaggataattgatgaaactcaaatttaaaacattgacttatcaaaatatcttgtcggttggtaacgtaccgatcgtcattgattttgattcagcaaagaaaaccctcattacgggtaaaaacggcggtggtaaatccaccatgatcgaagcgcttacatatgctctctttggtaagtcatttcgcgatctgaaagtcgggcaactggtgaacagtatcaacaagaaaaaatgtctggttgaactgttgatcgaatacggcaatgatgaatataaaatcatccgtggacaaaagccgaaagtatttgagatctggaagaatggcgaaaaactgccggaagattcagccgctggtgattatcagtcacagcttgaatcaatgttgaatattaacctggtgggctttaaacaggttatcgttctgggtactgctggttacgttcctttcatggaactgaaaacaccagatcgccgtaaattggttgaagatttgctgtctctgtctattatcagtgaaatggacaaactgaacaaatcatacatccgtggtgttaaccgtgaactggatacgctttcaatgcagattggacacgtacaacagcagatcgcaacacatcaaaagttcattgacgaacaacgggcaaaagcaaatcagaatacggcgcgttaccaggatatctacgattcccacgtagaaacagcaaaacagattaaagcgcaattagttgaacttcaaacccagatcgcagaatgtgtgatcaatggtgaagaccaaacagcaaatattcaaaaactgcgtgatggctatacacgcctctcaatgaacgtagaacagttgcagcgtcttgaggtgatgtatcgcaagggtggtgaatgtccggcctgtaaacagccaattagccccactcctgaacgcatggaagagattgccgagaatattaaaaacggtactcagaaacttacgctgattaagaacaaacaagatcagctacagaaaatcatggatgatttactaacacaacaacgtacactaaatgggctgaaatccaaatacgaatcactacgcggtacacttcaaaatgaagttgcagcggctaaacgtgttcgggctgtcatggataaagcacaggaagacgtggtgatcgacgaatccccagttgaaaaactccgtgaagatgaaaaggaacttgattctaaacgttctggatttgtcaaggaaaaatatttcagaggtattgttacggatctgctgaaagattccggcgttaaagcgagcatcgttaaacgttatattccttacttcaataaacagattgcgtactatctggatctgttgggtgctgattatcagttcactctggatgacgaatttaacgaatcgattaaatcgctgggtcgtaatgattttagttacgcatcgttcagtcaaggcgaaagagcacgtattaaccttgcattgcttatgacgtggcgcgacgtaaccagtaaaatttctggtgttgatttatcccttctgatcctggatgaagtgtacgatggtgcaattgatcgtgatggtagttttgccgtaaaagcgctattggatgggataaatggtaacgtaattgttatcagtcatcaggatttagatccggaagatttcgaccgacatattgttatgtcaaaagtcggtcgattctctaaaatggaagttaagaagtcttaaacttgcagttatcaaaatgccagcgattcatattgctggcatcaccagatttattgcaatatggacaaatcaactgtttcctttttgcctgggtctttctatctgggttatttctgcaatacggtatatgtgaacgcagataatgtaatgaagattctgttccgcaatatggacaattccccctttctttaggtacgtttccgttcttatgggaacacgggataccctcaaacttatgtttcaatccttcattacctggtttcagtttgcagttgtcgaagtgccaacgagtcatatttccaattatacctgattttccgcaatgaggacatacaaccctttcttgttgctttttggctttactcattcgctgtctggtttcttcggtgaactctctgttcctatgtgcttctgacgcctttttctttaaccattcatagcggcggttagctgttctttcctttgatctattggaaccaactgttaacatatgtgctgcaaaaacaagtttgttgtttcctgggtacatcttgactaataacagatgtgcaatataatgttgacgtgctgtaagattaaccaaattatcatcagaatctgttccacctatgcacttaggtatgatatggtgtgattctgtatatccatcatactgcgtttgtttagcatgttctatgatagagttataaattttgttatagttcataaacatatctcttgtttgatgggccgttagatacccctatttaagaggatgaaattatgttattagaaaaatcttttgaattagaaaccgctctggaaatagatcggttttatctccacaacaattttcttgaagaaaaacatatagttactatgaaagatgttgaggaagcattcaaagataaccctatagagttgacgcgaatcaagaacaacaaaagttctgtttggttcctcgaaaaaatctattgaccgaaatccataaatacagtaaagtagcccatgtaacgaaacgtgggctttgtttttatttgaggaacaataaatgatcactgaatccaaaatgacttatcaggaagcactgaaagttttgggcgcaactggtagcgaaaccagcgctgaaatgtccagactcttcaaacgtgcatccttacgcaatcaccccgaccgtggtggtagcaatgaattaatgcagaaaattaaccaggcttacgacgtagttacaaaaactgggcctagtggcgcacgttctgagactgctggtgatgttcgcgcacgttatgcacgtcaaaagaaagaatgggaagaaaaagttgatgcttactttgtagtggcgaaaaactatttcagcaccaaatttaacgcacaggaatttgcggaatacttcaccaaatacactggattgcctaccactttcaaacaggaagtaacaaaaggtagtcacggtgtttatgcttcgttccgtttcacttctggtgatgcttactttgatttcggtttcaactgcacccctccgaatggacaagggttagccgctccggattcatctgcactgggtaacgtttctgttagtacctttgtactggttggaactaaaaaacataaaatggcaagccgtgattatcaatggggcaaaaacccagataagatcactccggaaagcctgttcccgtctaaaaaactggaaagcattttcagccctgtacagaaaaatatcaaatacaaacgtgctgattaccttgcatcattccgtaagctgttaggcgctgacattagcggaaacgatatctttgttgaagttggtacactgaaagttcgtttctatcgtcacgtattcatgcgcaaaggtgcttatgtgtttagcgcggtgtatgatcctgctgtatcgaagtatcgtccggctgcacaacttcgcggaaccatgttcgaagacgaggacggcgcttgcctggatatgatcgttgatacgttcaaagagttgcagaaactgaaaccgagtgttcaaggcgttgtgaacgcgatcgataagatgaacgcagagtttgcggcggggcatcgttcagcatcttttgttaaacgtgtggctgctcaggaagccgcaccgaagccagaagagaagccaaaacgcactgttaatcgtatcggtaaagaggaatacttcgcagcactaaaagatattggtgctcgtgtaatgcctaccagcggttatgttgaatttgataacggcgctggtgttactatcaacttcaagcgtattgttgtaaaccgtaaagcatactactcattcagtagctttgatttcatgtactctggtcagaaacacattgagtggttgaaaggaatcgatatcgcagaagataccaaaggcgcaagcattagcctactcactgatactctgaaatctttacgtgggatctctgactggaacactgttaagagcgctttagatcaaatgaattctaacttcaaggcgggtaaattctccgcacctcatgtgaagaaggaagcagagcaaaaagcaccgaaacagaaagacgaaatcggcgcacagcctaccaaaccacaggcggctaagaaagatacaccagaagtggaaaaatcacaggctgttcatgcagcacgtgagaaagcgaatatgaacaacactattcgtaaaatgatgactatgttagtcaaagcacagcgcaaagacactccggaagatatcaagaaggaagttgatgcagcaattcaattgtggcgcttgacttactaatcaaatgaactataatgggaactgttaacgcagttccctttttatttgaggaaaatattatgagttgtccaacatggttacgtttggaaaatccgaaagaaggtacacaaaaacgaatttatattaatcttggttgggttccacctacagattttcaaatggctgagattttaatcaacgctattaaagaagtaagcgacacttacgaatgggaaaggctctattttcctttaattggtttgtatatgacgcgaaataaatttgaagaaatgaaacttgctgttattcgcgctacgattattaattcccaacaaagatttactttgaaaaatgcatggagttctgaatgattattcaagtatctgtacagggtgacactctgactgtcaccgaatccatcaataccgctcttgctgtatgtcgtgaccatatctcacaaaatcctccagtgactgagatcctggaaattgatgtttgggatcagattgggatgatcgacgcatcatatggatttaccccgcgagatgaagaactatctcgtatcgaatcatggctgaatgaacaggaaacggaatgaaactccctaagaacacaacactactaacccgcgaaaaacttcactctgttgattggtgtcctctggatatcatgatttttgatattgaatctcgcgtgatcaatgcaaaatatcaggggtgtagtattttctctgttgaattcgagaagattcgcgggtatgatgagaagtacaaagaaaaactgaaagttatgattgaagcattgggctatattgtaactgttgaagacaataaaatgtggatcgcaatatgagcatagtaaaagcggtgtttgcattggggcacgatatctaccacgatgatttcgcttttggatatcagcaaggcttgccgtggggccactgtaaagaagatttacagaacttcaaagaagaaaccgccgatagcgttctgattatgggtgcaaatacgtttacctctcttccgggtaaattgcctggtagaattcattgcgttctgtctggttccggtagttttttgaaaaccaaaaaaggcgaggttgctgattacgtgatccacggtggcgggttgtctgctgctattggtacaatgcaagcaacacacccagataaaaatgtgtgtgtcattggtggtaaggggttgcttttagattcaatcaataataaaatggttgatgaagtagttttgacacacatttacggacatcatgtatataatgcccccgcatttaaacgcgatgtttcgtttactgcttctgaattgggtgatgcattgttaaaatatgaattttctgatttcgaaactcagtacatcaaagaacatgaacgcattgaaaaaatcatagtcgatcgatataaaaaggtataaaatgaaacaatatctggatattattaaacttgtacttgataacggtgttgaatcaactgatcgcactggtgtaggtactattcgtattttcggcgcacaagcccgatgggatctaaacagaggtttccccgcaactacctgtaaaaaactattcttcaaaccgtgcaagcatgaattgcaatggttcctgtccggttcaaccaacgttgaagaacttcgccggatgacctggggtgaaaatagcgataagcgcacaatctgggatgataactatgaaaaacaagctattgatttaggatatgattctggttatctggggccaatctacggtcatcaatggcgttcgtttggttctctttatggggatgatgatagttattatggcggtagtggtgttgaccagatagcaaaagtcattgaacaactgaaatcaaccccagacgatcgtgggatcatcgtttcggcatggaaccccgttgatcttgatgatatggcattgcgtccgtgtcactgtttctttcagttcgttgtaatcaacggtaaactgtctctacagtggtatcagcgttcagttgatgtcttcttagggttgccgttcaatatcgcctcctatgctctcctgacgcatattatcgctgatatttgcgggtacgaagtgggcgatctggtttggactggtggtgatgtccatatctataaaaatgcggttgaacaggcaaaagaacttttacagcctaaccgttcaccaatgccattaccgattctaaaaatgccgaaggtaaatagcttacttgatttagatcaagaattctttgactcgataaccttagaagggtatcataatcacggctctctaaaagctgaaatggcagtatgaaaaatggggcttcggcccctttcttaacaaggtaagagaatgaatgacattaaagtagtagtaaaatcctctggtgtacgccagccgtttgacaaagaaaaaatatacaaagtgctcaagtgggcctgtgatggtcataatatcgatgttcgtgcattccttgaaaatgtattagaactgatccgcgatggtatgactaccaaacaaattcaacgtatcgctatcaagtatgcagcagatcatatttctgttaaagaaccggattggcaatacgtagcatcgaatcttgaaatgtttgcattgcgtaaagacgtttacggtcagttcgatcctatcccgttctacgatcacatcgttaaaatggttgaagcggggaaatacgataaagagatcctggaaaaatacagcaagcaagatattcaagttttcgaacgtgcaattgatcatgataaggattttgaattttcgtatgctggttcccaacagttaatcgggaaatatctggttcaggatcgcgatactggcgaaatctttgaaacccctcagtatgcgtttatgcttattgcgatgtgtctgcatcaggaagaaactgggttagcacaggttacgcatatcgttgatttttataacgcaatttccgatcgcaaactgtctctaccgactccaattatggcgggtgtacgtactcctacgcgccagttctctagttgtgtagtaattgaatcgggtgattctcttggttctcttaacgctgtaacctctgcgatcgtgaagtatatttcacaacgtgctggtattggggttaacgcgggacatattcgcgcaatgggttctaaaatccgtggtggtgaagctgttcatactggtgtgattcctttctggaaacatattcaaaccgctgttaaatcctgttcacagggtggcgttcgtggtggtgctgcaacactgtattatcctttctggcatctggaagttgaaaaccttctggtgttgaagaacaacaaaggcgtagaagaaaaccgcgttcgtcatcttgattatggtgtacagcttaaccagttgatgtataaacgcttaatgaatcgtgattacattacgctgtttagtccggatgttgctaacgatcgtctgtatgatctgttctatgaagctgatcagactgcatttgaagaactgtatgaaagcctggaaaaagatccaactgttcgtaagaaacgcatcaaagcggttgacctgttccaacttttagcacaggaacgcgcacagacaggacgcaaatacattttcaacactcatcacgtcaaccaacagggtagttttacggttcctgtccgtatgtctaacctgtgttgtgagattgcgatcccaacgtcgccgctggatgacgatgataaaatggctggtgaaatcggattgtgtacgctaatggctatcgttctggataacgctgatatcagcgaattcccgaaactcacgcgtattgcagtacgtgcgcttgataacctgttggattaccagaactaccctgtaaaagccgctctgaaagctaaacagcgtcgttctctgggtgttggtatcaccaactatgcatcatggttagcaagcaactattgcgactactcagaagcgtatacagacaaagttcatgagttaatggaagcgtttcagtttaaccttctcgttgcttctatggaactggcgaaagaacgtggtgcgtgtggattgtacaacgataccaaatacgctcgcggattactgcctatcgattggtattgcaaaactgttgatgaactggtagcacctgtttataattgcgattgggaatggttacgcagccagattaaaaaatacggcttgcgcaactctactctttctgctttaatgccttgtgaaagtagttcacaggttagtaactctaccaacgggatcgaacctccgcgcggtttagtgagtatcaaatcttcgaaagaaggacactataaccaggttgtgccaaaccaaaataaccagattgatttctatgatctgctctgggatatggctaaacgcggtaacaaagggtatctgtctcacgtagcagttatgcagaagtttgtagatcagtctatttctgcaaacaccaactatgacccggcaaactatgaagacgggaaagttaaaacagaagacatcattgatgatctgctgtatgctaactactacggtgttaaaaccttgtactatcataatacgcgtgatggtgctggtgatgaagatgaagccgccgacgattgcgcgggttgcaagatttgattaatgccccttcgggggctttttaaaggtaaagacatgttaacagtaatgaatacaaacccagatcataaccacttagaccaacctatgttttttggtgaagatactggtgttgcacgttatgaatcgcagaaacacaaagttttcgaaagcctgacacaaaaacaactttctttcttctggcgtccggaagaagtcgacctgtctactgaccgtatgcagtacgcaaaacttcctgaacatgaaaaaatcattttcgattctaacctacagtatcaaaccctgttagataccattcagggacgtgggcctaacctcgcatttttgccaattgcatccgatgtgagtatggaaacatggatcgaaacgtgggcgtttagtgaaaccattcacagccgtagttacacgcatattcaacgtaacttgcacattgatccttctgtacagttcgaccagatccttcgtaatgaagcgattatgaaacgttccgcatcgatgacacggtattatgatactctgattgatgaatgtcataagctgaaaaccatcatgatgctacaggaacaggttagcggctataaaccaaatgatccggctgtcgtgtattataacgagcaatacactaaacaggccactaagtgcaaagaagcgctgtacctgtgtatgcacgctgtgaacgctctcgaagcgatccgcttctatgtgtcgtttagtttcacctttaactttgctgaacaaggcaagatggaaggcaacgcgaaaattatgcgcctgattgcgcgtgatgaagcattgcatcagaaaggtactcagagtaaaatccgtttgtggcaaatgggtaaagatgatccagaaatggttgaaatctcccgtaggctgaaaaaagaagcaacggctatcttcctggaagtatatgaacaggaaaaagaatgggctgaacatttattctctgttggtgatgtagaaggtgtatcgctgaaaagcactatcgcttatattgaacacctgacagatcagcgtatgcgagcggtcgggcttgattcaccattcaccccgatccctaacccgtatccgtggatgaataaatggctcaaaagtgataacgtacaggttgccccgcaagaggttgaagtaagttcttacctcgtcggaaacctgaatactgaaatcagcgatgaagcgtatgcaaaatgggccagcaaatacgcgtgattgtcgggtagtaaacaagtacaaaactgattgggatgtcgatattcaaagaggtacgaagttcggcaacccttatcacacaggaaccaggggagaaaacattttagcgtttatcccctggttccagaatcaggttcgtactggggcgatcacgattgaagaattgaaagaacttgatggtaagaggcttggttgtacctgtgcgcctcttccctgtcacggtgattacatcgcgcatgtggttaatgttttgtgtggtaagaaaagatcacttgactttttggatatataatgtatgaaatctgaattcaacttaacccttgataaatgtggtcgcatcgatcgaagttttgttaagtgtggtgaacttaggcattgtgtttattttattgcaattaacgatgaaatagtatatgttggtaaatgtcgggatatgtggaagcgtttagacacgtatcgcaatgcaaagtattggagagaagccaaccccagcaacatcttaaaaacgtgtcgattggaaatggctatcaaaaaacgaaaaactgtgaaacttatcgtgactactcacgatgaaaatacatatcatgattatgaaatcaacatgatacgaaaatacaaccctgaatggaataaacagcactatgacaaaggcacaaactaaaattatcaataccctttacaaacaactcatgcagttgtgcggtgaatctgaaacatttttcttcgttgatcaagtaaccgtgatgggtacacctgttcgaatctttaactatcgcatggcctcatatacagactggctaaagcctggtgctctggaatgtcgcggtatcatgtttgaaatgaatggagatacccccgtatcaatcatcagccgccctatggagaagttttttaactatgccgaggtaaaggcatgggaagcgcttaacgagtctcctattgaattaggcgaagttttagacgtgatgattaaagaagatggttccttgatctcaactttccttgacggtggatttctggcggtcaagtctaaaggttcggttaaatcagaacaagctatggatgcgcacagcgtgttaatggcaaatcgtgaattgctgacccgcttaactgagatcgctaaagaaaactatacggtgaacatggaatacgtttccccgaaaaaccgtattgtcgttggttatgattctcctgatctgcgtattctgaacgttcgtcacaacatcacgggtgaatacatcccttatgatgaactctttgctgacgcgctgttacgtgcgtatctggttaagcgtgagaatatcgaagtactggatctggatgcattcgcaaaagaagcatatcagaatgaaggattcgaaggctatgttgttctgacaacgaaagggtttgtaaaaatcaaaacaaactggtatgtcaacctgcatcgcacaaaagatagcatcaccaacaataaggatcttttcctaaatattgttgagaatacggtcgatgacctgaaacagctattcagttcggatctggtctctctgaaaaagattgacgatttcgaaaaacttttccttgatagtctcaatcgtttgagtgcaaaagcattcaaagctattgaagataataaagggaaatcgcgtaaagattttgctatcagtctaagcgcggatttgtcaaacgacggtcggatcatcttcgggcctcttatgaagtacttcgaagaaaccgatccacaaaaactggtcgatcgcatcattgaaatgatggttaaaaattacgatcagttcattcctggagagtacaagtgaaatcatttggcgcatatagccgaacgatagaacaagaaaaagcagggattgattccctgctttctttcgttgatgttttccccgaaactggaaaaatttactggaatgataaagcatatcataaaagtaagagaggaaaagaagcgggttctattgtttgtgaagaatacccttatacgaaaataaagtatgctgggaaaaattacatgaggcatagaataatattttactatgttcatggttacttaccaatcatagttgatcataaaaatggtcttgattttggtgattgtattgataatcttcaagaatccgatcccgttcataatatattgaagaaaaacaaaaccagaaaatctaaaactaccacatcaaaaggggttgactatcgttcttctcgtggaaaatatagagcacaaatacggattaatggtaaaacgaaacatataggatattatgatacagaagaacaggcgtctatcgcatatgaggaaactttgaatgaatatcaaaagcatcttgggtatgattaatataaaatcgtggatatggcctattattgttgcttgctccctaatagcccttttttacattgcagtcgataccaaaattgaaaacaggcaattgtctaaggatatcaaagcgttacaagctgatatcaagaaagtaaaagagacaaacaacagtaatacagtgatatacgtcgaacagaaaggcaaggatcagcagttagtgaaagattccggacgtaaagatctgttgttcaaaaaaccaggactgatcgaaatcaagatcaacaagtcctttgaagagtatatgaaggattacgaaaaatgaaaattgcaacgttagcccttgttctgggcgttctgttggtcgggtgtgctgagaagcccccagaaaagattttgcctacgctccccgctaaggtgaatccggtgaatgtgaaatggaaagtggttgcagaagtccgagagattgacggtaaaaaataccttgtaatgccctatgacggaaatccttatgttgcattatcatatccagattcattgatttttcgtagctggatgaacgacgttaaaagacaaaaggatcagaccgataatgttctgtgtactttgggataccctgagaaatgcaaatcaaaataaccaaaacattttttcgtgacataacagaaggaaaagtttatactgcgaaaaaggataaagaaggtctatggatagaaaacgattggaatcgtgatatatggctcaatctgacgaatgagtataacaaagaactaattgaatatgagatagtgaaatgaatctgtttatgactattggcgttccgggtagtggaaaaactacctgggcgcatgagaaagcccgtgaattgggtaatactgttacgatctctcgcgatgatctgcgtagctctttgtataatgctggtaaaggtgctggcggatacaaatacaccaaagcgaaagaagaaatgattgcagaaatgcaagatcacgttgttatctctactctgaaagatggtaaaaacgtgatcatacacaacacgcatctgaaagaaagtgataaaaatcactggcgtgaaattgcattggaacacaaggcagattttcatattgaatattttgatgtgtccattgttgaattgcttcgccgtaaccacaaacgcggtcgtgatgcattacccgtttcgcgtgtttgggaaatgtttaaccagtatcgtaagatccgtgggttcgtaccagcaatggaaattgttaatccacacaatcagaagtgtgtgatctttgatgttgacggtacgctaacaaaagtagggcaacgtagcccgtatgactttaccaaagtgatcaatgatccgccaaacatcccgatacaacaactgtttcacctgtacaaaaatgcagggtataaatgcgttgttgtatctgggcgtgaaggtaatccgcaatgcgcacatgatacatgggttagcctgttaagttatggtgttgaaccggatgaaatttttatgcgtcaagaaggcgataccaggacagattttgaagtaaaagaagaaattttgtttgacaagattttagataagtattatcctgttattgcagtggacgatagagacactccggtcggaatgtggcgagcaaacgggattccgtgcttacaagtcgattatggtgatttctgattgacatctaatgtgggtatgttaaagtacccacacaaaagaggattacattatgaacgttattcgtgaagataaaggcatcatggttgaacttggtgatcgcattcgcgtagaaaatctgggcgattttaaccaaaaagttcgtttgttgtgccaaaaaattgctaacaaaattcaggaacagggaaaagcaccaggcgggtttgaagttagcgccactccggtttctcagtactcctatattgtgtatattcatgacgtggatactaacagcacccaatctttcgggctggtgttaaatcctattactggctacgttacatgggcggctgtattatgaacgtaaaaattattgatagagcggtaattacggacgaatctgtatacccggatcctcgttattatggcggtgttttcggatacatcaaaggaactgatattgatgtagtaacaagtccgattgcagaatatgatatcaacaaaaatcagacagaagttcgcgttactacaatcaacggttcagaatatatcgttgaagcgactcctgattttatcaaacagctactaaaggtgatgaaagatgcttgatcatcctggctctatgagtatggtgctcctggaagcattaaaagcatatgatatcccttgtcatttcggtgaagtaactgttaatactatcattgacgaaatcgacaacccaaatactttcattgcttgtcttgttcgaaaatttacaagttgttttcgaccgagtccagaaaaagtagtaatcagttctgtttctgctcatcatcgagtgttagatgatggaaagattcaactttactggaaagttctttatcacgtggtgtatcatgaagattgatgatattatgtttatgcttagagcaataagcgcttctaagttctctcaatgtgtctctgttaatgtcggtgctgcattgagaaatggtaacgggcgtgtgtttgtaggcgcaaataatacggttgatcctagtcatcgttgtacagatcagtgcaatcacttattagatgataacgggaaactgagtgaagaaaagcgccctgaacattcacaatggtcagatcgcaacgaagtacacgcagaaatgcgcgttattatgctggcggcgtctcatgaacaaatcaaagacgcaactttgtatacaactcattccccttgctcacaatgtgcgaaaaatatcgaattttgtgttgcaacaggtatgattaagcgtgtagtatatctacataaatacgatcgtggtggcatcgagtggatatggcgtctacagcaatacggtgccgaagtagtacaacttgaccccgaagaaatgaataaacatttccggatcaaataacaaatgagtaaatgtatgtctgaactgagtgtaaaagcatcctttgaatatgttttgattgaaaccaacgctaaagcggctggaactgaaattgtatcaccttctggtattgtgactggtgttcgtcaacacggcgaggaaccgatctacggcacagtgttatcatgtgggccggatgtaccggaagaatataaaaccctgcttatgggtaagcgcgtaccgcttcctcatgcacaaatggcaaacgtgccggatcctgaactgattgcaggaaaggcaacaaaagaagaagctcgcaagtatccggttaaatatgtaaccgcacactataaagcgattcaagcaatttacgaataagagatccaacatggctaaacaaattcaagcaatcatcgccgataccgtcgcaaaatctaaaaaacttttcgacaaaggcgacatcctcgaagcaccgacccgcatcgatgtaatgacttcaatgatcattgatgctcaccagggaaaactaaattcccgtgcttcggaagtaatggaatacatcgtacagttcgaggatgtatgcaaatacgccaaagctgttgatccggctgttcgcgaaatctaccgcaaacagttctaaaaatatcggccccttagctcaataggtagagctaatcactcataatggttaggttcccggttcaagtcacgggaggggccaccaaacaaggcaaggcacttagagaagcgggaggaacagaatctgattctgttggttgtaggtgcaaatcctacccttgccaccaaattagggtgcgtagcgcaatgccgttaaatggttcggaatatgcaacctttctcacggagaaggctctgttggtatccggtaataggttccccggaatgcggggtgaagtaaagaaactcccagcccactaattttaatgaggtttatatgaaatttcgtgaaactgtgaaataccataacgcggtcgaatatacacagatttttgttgatatgtctcccgcaaaattcaaagaacgttatggcatgacatttaatgaatggaaagatggattgcccgatggggactaccgaaaaaacttcaaattcaatgaatgttatgtggatgatgatccttacgatctggatatttttggtaaaacaacgcctctcattgagaattcgccagaacagctttacgaatcttgtattgactctgcatacgaaatttaaagagataacatgaaaaatttacaaaaactgtttgaaatgtctccggcaattagaaaaatcatcggagaaaatagcaatccaacgaatcgcaataaaaaattgatggaactttttgcaaaagagttcgatgattttgattctgaacttcataaagcgcttgaggcatattctaaacaagggttctttgcatcgccgcaagtaaatagcaagaaagagtatagcgaacgattctttgattgggagattgtcaatctcgttcgtagaacaaatatatctcctagcaatcaccaattgatttctcttgatacttcggtattctttatccagtatcttatcagcggtggtttcaaaaatcctgaaattccgtttacaaatgaagcggttagcagtgaatttgatgaatcatttgtatacatcaacacaaacaaataatcaaatggctatcttcggatagccttatttttggggtgtctatgcgctttttaaagtatgcaagttggatcgtactcgtccctcttgacattattactggagtattagcaattctgtttgccccgtttgttgtaccgttctacaatgagaaaacagggcatcttcctaaaggcttccggtggatggaaaccttcgataaccctattgatggtgatggtggacatatccgccgttgggcgtccatacgctatcatctgggggcttttggggtatacatgcagcgtgttggctggttgtggagaaacaaggcttataacttcgcatatcacgttttaggacgtgaagcgacaagcaaattcaactggaaaggcaacccaaaaacagaaggtgggccgaaccctgtaaatcatgggtatctgctcatgtggaacgaatcagcatggggtttgtacgtttacaaaccgtggctacggatccacaaagtgcaattctgtttgcgcgtttatgctggatggaaactgaaacaagaagttagcgacccagttaacctggatcgtgcaatgctggcgtttcatttcaacccgttcaggtattatgtaatcaagtaaaggtaatacaatgaaagcatttcaaattttagaaggtttgcatactggtacgatctacctggaagaaggtaacgacgttcggatcgtagtatcaaaaacattaactatggattctgtgatcggtaaagctcgcgttactccgtttgcaaagcgagagattgagatcgaatatcagccaactgttaaggtggaaggtggacaacatttaaacgtaaacgtgttgcgccgtgaaactctcctggatgcggttgaacatcctgaaaaatacccacagttaacgatccgtgtttctggttatgcagtgcgttttaactcactgacccctgaacagcaacgcgacgttatcgcccgaacctttacagagagtctataatggcaattgctgatatcaagggttataaaccccatactgataaaaaagtagaaaccgtaaatcgtatcaaagatgctgaaaatgcattaggtgcaatcctggaagatatcgaacagcgactatcaaattcagatattgattcgctgatagaggaagaattagatgaggtgcttgaacgtatccatcaaatccaactggctaaagaccgactgaaagaagcctctatgtgggcgtgtcgtgcggtgtttcagcctgacgaaaaatattaaaaatcaagccgttgccgaaaggtagcggcttttttcgtttttggtgtaaaaagttgttgactcctttctcacattcccttatagttaatcccgtagacaagaaaacacttttatgaggatgacattatgaaacgctcttacaacatgaatgaactggttttcttcaaaactcgtcgtgaagcacgtgcttacgttctggcggctggtaaaaatacttctgctgctatcgatatgggtactgataaagctgttggtgctcgttgggccgctgttatcgttatcgctgctccggttactccggttaaaactctggtacttggtgcgcgtcacgccgaaactcttaacaccgctgcaagcggtaggggccacgaagttaaagtgttcaagaagcgttcttatctttcatgtgcaaggggttaactatggcacgattcatatataaagtggaatacgaaaatactgagttatctgatacctttttgaagatgattcgtgatcacgggcaacgtctggaaagagtaacgattgatactgcttttgattgtcctgttgggttggttctaacattatcttgcagccctgcaaaagaatcagcccgtgtcgaaatgttacataaactaaatgcattttatgaaggtggtagtgtatggcgagtattgtaaaatttttcaccgactcagtgaaagaaattaaaagcgctctggaacaatggaacactcgttgtgacgtatccattaaatcagagtacgaaacaacttatgatcgttatgatccggcccgtggtttgcacaataacccccatgaggtggaagtgtgaaatactacggattcaaaacgagtcattttggtaaagcgtatcgcacagaaaacatcgatcgcaaacgtccgtactatgattcgttagtacgagcgggacgtaaacgcgctcgccaggaagggaagaaagagggtgaagatcgtggataactggaaaacatggatatcaattatcgttggtgttatcatcgggcgcggtttgtatgatttaatcttttcaataggggttaactatggacattggttcgggtagccagtacccatcatgcgcgttaagcaactttgcccctcatccatttacgtttgatggggtagaatgtgcatcaatggagggctttttgcaaagccttaaattcagtaatcccgatatgcaagcccatgtgtgtactctggtaggcaaggccgcaaagttcaaaggcaaaaagaaaaaatggtggactaaccagaccctatactggaaaggtatccctattcatcgttcctctgaggcgtatcaaatcctgattgaaaacgcatataatgcgttattccttaatgaagggtttcgccgtgcgctggcagcaaccggaaaaagtaccttgacacattcaatgggaaagaataaaataaatgaaactgtactgactgaaagagagtttgtacgcaacttaacccgattgagagatctattatgagtgaaaaagaaagagtagaatgtgtgttccttttcaaaggcgcgatcaatccattagcgttactgtatgcgcaacatgcattacgttcaacgttgattcaaagtgtcatctataaagcaggtgtgtattatgttaccatcggcgcaaataacatggttgttattgaatcctacgttaaggaatgtgcatcaaacggcgttgtctttgataaagtcgattttgatgctggggtagatgctgtttatatgtataagggttaatatgagttacgtagtttatttcgattgttcggatctcgatccgttcgtgcttcaacaggcaaagaaatatcatcaagatgttgttggcattggtgtaacaaatgatgatatgctgtgtattgaatttgaatactatcgtaaattcgagcgtgattatttcctgggtgaattgaacgcattcaaaagtacccttttctttgatcgttatgaggttatatcttgacagaacttgatgaactcgttgacagtttacgaatagatttcgaaactggtaagtgtttctgggctaagaagataaccaaaaagactgttgttggagaagaagcgggttccgtccgtcccgatggttattgtagaatccggttcaaaggaaaatattactaccgtcatcgagtcatcttttatgcacggaataggtttcttcctgacgttgttgaccacataaaagaggttgacaatggtgacggtgtaggtaatattcaggcagcaactcaccaacagaatatgatgaaacaaaatatcaattcgttgaataaatctggttgccctggtgtatcatgggatacacaaagaaacaaatggctttccactattaaaaaggatggaaagaatatctatataggtcggtttgcgtcttatgatgacgcggttactgcccgaattaacaaagaaaaagaactatttggaaacttttataatgagcacaaacgcaaagcctgtaattctgactgatattgacgggatcgccgtaaaatggcagtcggggttgccgttctttttgtctaagcacaacatgcctactgatattgcattggaaatggttacggatgaaaaatttcgtgatatgaccgaaatcttcggatgtgatcagcagttggctaaaatccttatggaagaatacaataacagttctttcattcgttatctgaatgcgtatgatgatgcattgattgtgatcaaccgtctgaaaacgcagtatgatttcgttgccgttaccgctctgggaacaaccccaacagcaagccttaaccgaattgctaacctgaatactcttttcccgtctgcgtttaaagaggtgatggtcgtgggccacggtgaaacaaaaactcatcgttacctggaagcaaaagcaaagtatggtaatcgtctggtttgctttgttgatgatctcgcgataaacttaaacgaatgtcataacgtcattagtcaattgccgttattccatatgttacgtggtgaacgtgaagaaacaaatgcacctcaccagttagtaaaatcgtggtttgaaattgaagagaaactaaatgatcttgtcaatccttaatgaacttgcgtctactctgaaaaccaaagagaaagaagcaattttaaaacgtaatgccgataatgaattattgaaagaagttttccgcattacgtatacaaaacagattatgttttatgtgcgtcaatttcctctggtagaagggaaaccaggcacaacaccgctttccgatgcaatcaaagcattactggaagatttagcaagccggaaatatacaggcaatgcagcgcgtgatcgtttactggatattgtatcatcagtgaacattaacgatcgtgaagtgctacgccgtatcattaaccgcgatctggaatgtggtgctggcacaaccttaccaaacagggtatggaagaaactcattcctgaacagcctcaatgcctcgctacgccgtttagtgaaaaggctttacgtcgcatcattttccctgcttactcgcagcttaaagccgatggtgcgcgttgcatggctgatttgctggaagcattaaaccgtaaggtatcgagagcgggtaacgagtacgaagggttaactcagcttgatatcgatctgaaaaagattcgcgattatctgggatatgatgtagttctggatggagaattgatttatgttccttccggaaccgtaccaacattacctgaacctgaaacagacatgcctttttctttatctgctttcatggacgatgatgataacgatatcgcgctatttgcggaagaagttcgcaaagtatcgaccccagaagaagaacaggcagaagcaaaacgcgaagaaggtaacgggatcgtaaacaaatctctgaaagggacgatcaccgaagaagaacagcgaaacattgtttatgttgtttgggatattattccatatgaggtgtattacggcgaagctgaaagtgttcagacttatgatgagcggtttagcctgttgcgtgatatcctcctggatctttctctgccttctgttcgtttgattcagtctaagctggttaataacattgcagaagcgaagcaggactataacaattaccgcaatgacggtaaagaaggttctattctcaaaaacagaaacttcaaatggaaagattcgcgagtagccgatcaggttaagctgaaaaacaaaaccccgattgaactacggatcattgatatctacgcgcacactaaagaagaccataaggtcggcgggtttgtggtggaagatttatccggaatggctcgaacgaataccggatctgggttaactgataccgattatcgttacgatgatgatggtattacccgtgtatacattccattagatgaacgtggtgaactggatcgcgaatacatcatggcgcataaagatgaatacattggggccattgtagaaatggaagttgacggcctccagaagtcgaaaacgcgtaagaaaggggaaccggaatacagtttcttccttcctattatcaagaagataagacgcgataagaccgaacccgacgatattcatgttgtctttgcagatctattttaataaaaagcccttgactccggtcgggggctttgttatattgggcctatcgaaacgtaaatcactaagagaatatattatgactagtagttatcagaaacacaaaacccttatggcaaacctgtccggtaaacatatcgacgaagtaaaatctctgctgacagtgaccgaaggttcccgattcgaaacaaatcacattatcaaaccttctgtgaagaaagtactgaaagtgatttaccgacatccggtgtatcagtgcgttcatatcatgaacagcaacgcatttattttcgtatataacgaatccgatgataagtgtgttggtattttccgaaaacctaactttgaatgcatgagcgaagcggctgttgcaaccccgatcgttgaagaatatccggattatgttcaacgcaacatgcgttatgtgcaatcccgacttgattatgcatacgatttcaattctgacgcggtagaagcgctggcggatatcctttgcaaaaaccagaaagatcgtcaaatgacaaaatatctgactgatccaacaccgccaacaattcgaatttctgttgaagttccgtttgaaaatcatttcatggcagttgaagcgcttgctaaacttggtttagaagtgaaaacagaagccgtttaatagcactttttgttaaagaagcctcttgcaatgcagggggcttttttgtatagtgtgttcattgaaacgaaacagacaaaaggaacatcacacgaacttcatcgatatcaacaaagatttggaaggtaaaaacatcaaactcgttaaccgcgaaatgttagagagtcttggtaacggtggcgaaaaattcagtgaagaattctataacaatttatcattgatgacggtcaagcgcgttgatgttcagggtggttccggttgggtttctgcaattccggtttccctggtagatcaagcaacatatgacccagttgcggattcatgggatctagaaatgccgttggtattcgaagaagtcatgaagtgctacgaaatcgcataagggtattattatgaatagcggaaaattacaaatgaaagttagcgaagaagaagttaaagagcggttatcggtagcaagaagattccttgaatctatcgaccctgataaacttggaaaatgccctgatacgatttgccttaattgtgggcgttctgttcttgttggtaagtgttgcgataatccaaatatagttgtgatggaaaaggaacaagtatcccccgaaacatgggatcagatccaggaaatcattaaaaaccctccagcgccaaccaagaaattacgtgaattgatgacaaggaaaatgaaatatgagcaaatttaaattgagtgcaaccgttcgccttattcgttggaatggtgaagagatccgttatgatgaccctgaattcgcccatgaaattctttcgcatcgtctgggattgaaaaacgcgtcattggttcagactgttaaaacatcagcagatccggaaatttggcgttgtgttatcctggatctcgataacaacattgattatgatgatcctaagaactatccgcttctggaagcacaagttgagaatgctccagaagacagacagtgttttttggttgagttgccacgcgaacattacgaaaacatcataaaggcccgtaaaaaggtcaataacaatgttttcgatctccacctcggattgtttgaggattaagtactgctagttgtgttcgtagtagcggcgctggtaggttcccccacctgtatacattcaagtgtttgcaggtggaaatcttttgatacgtctcgaacacattcaacgatcagatattttcctgcatactcttccccaaatacctcaatgattgcccctaccttaacatctaaacgaccctgctttatatcgaaccggatccggcgttcatagctggatagcaattgcattttagacgcctggaacggtttaccttctgaatctgggttctgaaagttggtatcatagattgcattacggtttgtgaagatccatgtattttctgtgtctgtatcagccagtatgtcaccgtacatctttttatcagtcaatgacagactaaagaaactggcatctttaaacagcgttgtgttatccttatgggtaatgtactgggcttctgtgaatatgacagtatccccaacaaacacgttatcaacgttaaatttgtatgctgggatcggtgtctgggccagaatgtcagttgaacttttaaggaaaataccggaaccatcttcccacagataacagaagtcagaagaaactacactttgcccgttgtccctgatataatcaaatatatcctgatatgtaccatttagacatccaggagggatacgtatgttaccgccgacaacttcgggggtaagtagtttcattttgctatacagtgccgtcatacactctgtaatcgtctgtacggcgttgttactaaatgaacgggcaaacttacgtctgaacgttttatgcagcggagagaggttcatacgcagcacagaacggttcttatcgtcagtatctacgttagagtaaagcaatccgtaataatgttgttcctgtgtaccgttatactggaaagatacctgtatgatcggctggataagttgctgatagattaactgtgcgtcgtatatctgcatcagcgtttccgatgagccgttaatcatcgtcttttcactaaacgagacaagagcgggtagcaattcagtatatgcgttatcaatgtatttttcgtatgatgtatataatttaatcgatgtgactcgattgacgattttttcagccataaaaatccctcctaatatatcctatttactaaatagtaaataatgacccaggttcaatttgaggcaataatgaaaaataaaactcttgataaatttatgactacacggcttgaaatcaagaagactaacgttaaaaccgttcatcttccggatggaacagccattgagatccctaagatgtcgtatcgtcattttgtaaagattaagactctgaaagatgacccagttgcgatcatgcgattcatcattgatgacatcaaaccgcgtgaactgacagcagcggaaattgaatttgtgttgatccatatgtatgcacacaataacgctgattatgccaatacgcttaaagaaattgggctaaatcttgatgacctcaaaatctccgaaccttgctatgattttacgtttgacaacgtgcggttagtctttgacaaacccagcctgttaaatgctcaccttccgttcctcatcaaagaggcatatgttgacggtaagccagtagaattaactgaggataaacgagacgaattaattaattgcctgtaccgattcgaatatgatcaggtatcgcgtggtgtcctccaggaagtatacattatccatgaggggaaaaccatcaaagggcttaacatcattggtgaatgataatggctaactcttatttcaacgaagaacaaaagaaaaagtttctgaacagaaacagcaacaaacaaccagcggtcaccaaagtaacagcctcccttgatgctgaaagcgcccgtgacctaaaggaaatcaacgataacacccttgaaagtgcaatcaatactcttgatatcaaagaagggttgaaatcgttcgaagaaaaattccgtgacaaattcgcggggttcaaagaacaatacgaagaggataaaaaggaatcattagccgaacaactacctgatttcgtcggcccgatccgtcctatatccttaaccgatgataactcaaaaactgttgacaatacagtaaacgttaaccaaaatggtcagttcggtaaactggaagaaaacaccgaatctatttttcatgctattaacaaacttgttgatttatatgaaaatactgataagcataagccgcttcctgaaccagtggaagaacctgatccgtatgtagacactaagaaaaaacgcatcaatgatgatgatgacaaaagaagcaaaactctggatagtattgctaaaagtctggtttctattaaaggttttacatcgcagatccttagccgtttcattggttactctctggaagcaatggcaaagtttgctaaatggacgctccttattggttcgttaatctttacattcgatgtgttgcgcgtcacaatacgcaaatggttcgaagatatcctgaaagaaggggaatcctcaaagaaactatttggtacatatctgggtaacgtaaaggctatcgtaacaaagatcgaagaaggtttgaacaacttcaatatgaacaacttaggcgaatcacttcgtgatttgttcgttgagcctatgaagttgttggggcaaactgtacaaacggcaatcactgagggtatcggtcgtcttattcaatcattgggtgaatcaactggcatagacagcattaccaatgccggacgcggaatgcagatcaccgctttacgtgataaacagaaatttggtcttgaattgactaaagaagatattcttatgatcaagaaacaggaactagaagaccaaaaagcggcattagaaaaagaagataaagctattgcagcacgtcatgcattaacaataactccttctcaaattcctaatggttctatctataaagttgctcctactgattatcaagaaagaaatcagaaaaccgtagatgctgataaagaacggcttgataatatgaagaaagcaacggaagaaatgcagaaacaatacgatttagctaaaagcagcgaagaggaagcacaaaaattagccgatgaggaaaacaaacgcaaccgcgcacgtatagaagaagcaaaaaggttagaacaagcgaggaaggaaggaaaacagccgccagaaggtgaagagaaaaagggtgatgatctgttgggtaaagcaaccaactatgctaactctgaaaatctggatgcagccgatatcaaatacattaacgatgaactgttggatcagcttgaaaaacgtcgtaatgaaggcaatctggacgatgtacagaaggatagaatctctgaccttatcgagcaattgcaaaacaagattgcagcccgtacagaatccagcgccccgatcgacgcacagccaccgttagcagcaaataaaccggatgctgataaagcaagcaacattcaggttaacaacaaaactgttaacaacaacgtaactcattcagtacaacgcacagagcataaaccgctcgtagcgctggcataaggaacatataatgaagttttctattattgatgacagtataaacactctcaaaaatattaaaaatcgcggtatcccctctgggggtgccgcaatcacagaatcagtattaaagcaaactatcgttaccgccgaatttccggcccaacgtgcagcaggtatcgataacgcttataatgcttcgagtctgtataataacggccttctgttcactgcatatgattttaatggtgttggtagtaaagacaactatcgttcattacgtcaggcagcacagaacccaaaacaaatactatcatctgcgacgggtaatgttaagtacaaacaagtgttgaatagttctattggtactatggaacctgtttgccagatcctgctaccgcgaagcctgaacgataacgaagtaaacagccaccgctatcaagatgcaaacgatagtttcttaaccaaagggttgagccgtgttgtttcaaacatggtatggggcgctgtagaatccgtttcaggcggtattatggcagaccgaagagaagcccttgatgttggtactaaagccgctttccagggttctgacaagcgaacaaagatgtattacaatacattcgtgattgaaagccgtaatgatttgctggaactgattaaaatctactatctgtttactgttctgggatacggtacaacttctggcggtactgctaaagaagttgctgcattggttaaacagtattacggtgttctgggtgctaaaaccgctaacgcaattagcccttccagtaacccagtaacagcgtcagattttgataatagtctgggtaatgacgtggttgatttcatttcaaacgtagaggttattaaatcgcctcctgtctggtttattcgtgatttccagtctggggattccttgcgtttacctcattcaacctttgggccagcaggtattaccagtgttcgctttggtcgttctattgataatattgtaaatacattaagagaatcaccaaataccccgatctcacttgaggtcgaaattcaatttatggaactgatcgatatgcgtcaggattctatttttgatacaaattactaaggagatatgatgttttacaacgtagatgaatttttatcaggtatggctaatcgcgattttcagcgtagcaacctgtttagcgttgtatttgcaaccagccctgcatcacgtatccttgacaacacgatcggtagtattcgagatactttgattgatggatctattagttctatcaacgcaaacaacccgaacgaattcattaatgctatcactggcggtgtgagtaaattgtttagttacaccgtcgataaggcgattatgtcgctgaacaaaacaggatttagcaaaatcatcggggcaattagcccccgtttgattacttccctgtttggtgatagcatgtatggacaactgctatctgaattccgtgatgaaatgatgtataatatgggtttaagcattatgggagttaacctccctggtaaatccattgggtacgaatacgtttataatggtggcgtacctcaaatcagattcactcgccctgagaatggggaattgtcattgacgttccgcaccgattcagaagcccgtaacctgaaaatctttaacgaatggatttccgctattcgcgatgatgtaacaggacaatacgccttcattgatgaagtgacaagtactattcaggttaacttacacgatcgtgatggttcaccgcatacaacatacgtatttcagaagtgcttgcccgtcaaaatcagtaacagtgaattgagctatgagaacaacaacgaaatctggacatttactgttgattttgcctataaaacatcatgggttgttgaggctgataaagaaggctgggaagggttcaaacaatccgtagaggaaggtttagccattgcagcacgtaccgcaattacaggacaataaaggggctacggccccttttgaggatcttatgtttgatattattcgagtaacattaccatcagggatcaaacgattccctatgtttacagttaaagaccagtttaaattaatgctgacccgtattgatatggaaggtcggccccttaaagagcaacaggaaatactggatgaagtgctggatctgctttatcctgggtattccaaaacagaacaggaatacattttcagccgggtgtattgtggttcgttcggtaaaaacgttatcaaggttgtgataggcggtaaaggtgggggccactccgaagccttcatggtgattaatgatattcaactagaaaatgaatacaagttgaatgatgaaatcacattagggtttaacttcccccgtacacgcaatacaagcgaagagttgtttcttgaatgtatcagttatgtaatatacaacgaacagcgctatgaatggacatcactaaccgaagaaacgaaagagaatattcttgatatcgtcgaacttgatgatgtcgaaaaaatcgttactatgctaacgaaatcggttgatgtgtctatgcgcggtaaatcatttagtggtatgttaaccctgttcaagatattgtttagtcgtggggatctggatgaatttgtgaagaccaactatctgctaaataaaaacggcctgaacctagaacctatcatgaatagtagcccgatggaaaggcaaatttatactgcattgcttgcagaagacttgaaaaaacaaggtgctgttaaatgagaaagcatgaatataaacacgttgagaaatataatgttgattatcgtcctctgacacatacagagtttacccccaatgcagattttatcaaaggggatgtttacctgtatcaaagagaatatcttttcattctggcacttctggaaagtaaaaatatcgatacccgtcaactgttcatcaactgtgaagaatgtcaggaaagaatagaattccagcttaaacgcaatcaaataatggttgaagatttcgacgataagctatacggcaatgacgggatcgcgttatctgttcaccctcgtaagactggtgatgaagagatccccgatcttatcgattacgtaatgatagacggcgaacagatcatgtggagtgattgcagcgacaaagataaagaaatggtattggatgcaatcgactatgcaacctataaatcgatttctaccgccctggataagccagcagtggtcgcaaacattccggtaaggtgttcgtgtgggcatagccatatcgtctctctgagaggcttacagcaatttttaaaggtggtctaaatgggtgtaaatctgaggttgctatatagcgatatagaacctaacatgcaacgagattggaataatgacgtagcggcttcaaaaggggccgcagcagtaagaaatagtttgattggtatcgtaaccacgatcaagggtacacgtccatttgatagtaactttggttgtgctattagtgatatgctgtttgagaacatgaaccctcttacagcggaatctatcagaacatccgttgtgtctgctatccggacatatgaaccgagagtatataatctttctgtcgaggttatacctctatatgacgataacgcggttactgtgactatctattacagtattatcgacgatccggatgatgtagaacaaatcaaactccaactttccgcctcataacaaaaagccccttcctttcggttggggctttcttttagaattcaatgaatcccattagttcttgatatcgcaattcaaacggggagatataactttgcatctggttttgatcggatacgatgtaataatacacctcatcattatcatcatatagcgcttctttgatgatgcaatagcgatcggtttccacgttcacataaagagtatccatgtactttgtaactttggaaccctgtgaactgatttcacgaatagcgttatctatgaaaagcgacaatgcttgcatgaagttatcaaactcaccatattcacagcccataatagaaattgcagtgtattggtgccagcctttgattgtgtctccacggcggatccatccaatttgtctacccccgatagatacacaccacactttaccaacgggactataaaaccgcacaacttcttttaataacagggacatgaccccacattttgtataaggactcatttcaacctcatttcatatcaagtagccaggaagggctagtttcaagcgaaatcgcagtatattcatattttacagtataacctttgaaaccgaaaggaataattgcattttcattgagatattttactttatgctttgcttcttcttcattcagagcagcacagactgttgtttgttcaacgttaccaacaggagaagtaaatttttcaatgatgatgtatacgcagttcatatcgtttccttatttcagtttctttccggttttgagttcatattctaactcacgaacttttattcgtaaagtcattaaacacacctgattctgactgtaaaggtattgggttataactttggttttaaacttctcatcgacttcggaatctttgagccaatcagacatcatctgatacgtagggaggtgttcgcacttctcatcgtctgacatcgcatcatacgttgctttgtccatcgggggcggttcctcgaacgcgagagcgggggttgcgagaagactcagtgcaagtagtaaatatttcataacgtattcctcattgttttcgatagaaccaatatagcaaaaagccccgaccgaagtcaagggctttttcatcaatgcaagaaagatttcacgtactgttcgatcttttcacgacatgtatcaactgaggtgctttccgcaattacggcatgacataacgcctcgccgccgacccagaaactcatcatgtactgaatatcacgaccttccatttctttttgatgcgctttgattcgttcgaaagcattttcgattgtttcagtagcagtaagcatttcggattccccgtcaacctccgccagttccccatcgatcatttcgctttcgacttcttcccagtatactatcgttatcatgcattaccccagtggttaaccgtcgtaatccccgccacaattcacatcgccttcaatgaacagttcgcggttatcacgtaataaattatactttctttcgagttcaggcccgaacgcgtcggcgtcttcataccagctataattgtatcttccgcattcatcatcatattctggttcatcaccgcgctcgttgaagtgaacaattttaatatcgtccatccccagttctttcagcttatcccagatatacgaaatctcaacgctatgggaaccgaacgcttccagtgagatcgtaccgtcgctatcgacttgaggaacaccccacttcgaacgagtatcatcggtgatcatatctattaatgactcaatattattctcaccgtagatatcagcaacttccttttctttaccagggcgaacaagtccgatcccgataataaagctactgcttgagctattgctcacaaacccagaacgaattttcatcgcatcaccatattaccaatcatgaatagagggattagcgcgaagacgataccccatagaatgaccttatcttcacgacggtcgcacccatgatagataacacctccagcgaaaaccaatacaacaactgaaacgaacgcgaataaagaaatcatttgcaggtatccattctcatagaaacttctttcaggatcttattcagatcgtgaagcgcatcttttacgttaccttcgttataggtaagcatatcctggtacagccctttcaagcaacgattgattacatatgctttttcagaaggtaacattgtaccagagcgattataatctctgaaaatgtccatcatcgtgccgttgttaccaggtaatgacgggttgaagttaaccataccggacatcaaactatcaacatacacaactgttgtgttatcagaacgatacgcgccaccaactttaaaccagttgctgaacacatacggagattcccgcacttcgctcaaatcggttccgatttcatcgatgtttacacgaatgttgttaaaatacaccgattcatcaatagaaccatgacgccataagatagcaccattgttatttttgaatccgactacatcaacctgccagccgttatctgttaaccggacatcatcaacgacgatgaaatcaggtagctgtgaatgaaagccgatgttttcaggacgggaattacgaaacccatcacgattggagaaataaaggatgtcaccttgattaagttcgcatatattcataagatttttaaagtccaattcaagtaattccacaagtcacctcaaagccccctttcgggggcgagatctcattagagtttaacttctttttcttccagaacgattgtgcaatcaaatttcacatctttccagaattccgctgcaacgatatctgttgcggtaacgcttacgctggtttcttcaaaatccagatccgcaaaccatgcgtgtccgacgacaataccgtacattacacgactcaggcgattattaagggcgcgaacctctttaatagtttcctttgtctgcttatcaagatactcgatcaggtcattcttgtcaagcgcttcgatctctttagatacagtatcataagcccacagaatgatcaggtcaccattgttaagtttcttcttaccttcggcgcgttttgcaacggtagccgcaacagccggaagtgatgaaacgcctttgattttcacgttcagttctttcgacatgtaaacatcagtcgattctgtgcgctcaaccttcggagagaagccgtaatcacggatcccttgctcagacaaccattcaccagccgcctcaccaaagcgctgtttaagcccttctgcgttgcgtaaaccaatcgcgttatcacggaagaacttcattaccttctgacggcctttcaggatttccagacggacgttatcagcaacaaattccttaccagaaataccgcgagtcatcgaacggttaaccagaggcagagaggtaaagtcaaccagtacagacatacggtcttcaccaattttagccagcggcttgatagtcagaccagaagcacgtaagtttttcagagtcgggatatcggtttccagcggaagtaccttaacgttcacgataccatctttaacaatggtaaagttacgcacttgtttggtttctactttttccggcaatccaaactctttttgtttgctttccggaatggttacgtaaccttgcagatccgtattgatagaaatgttcggacgggaactgttacccaccaggtgtttcactgcaactttcgttgtagtttgggtaaattccggtttccatacttcgtgcgctaccagttgagccgccagtgcttttcgttcttccggagtagaagcatttgcaatctgttctgacagtttatccagtgtatcatcatctttctggacagtctgacggcctgtgcgattgtacgcccaatgttcagaagacaggtcgatcactgtgtcggtttctgccagcagttcgagagcatcaaccagagtaaacgcgttttcatcaggaaccatgttgtaatcaacaccatccatcagacgtttagccggatcaacaaccgcttcggagatcatatctttagcgttggaataatcctgtttggtaaagcagttatcgtatgctttaatcaggcgcacatcacccagctttttcagaactttccatgccagatctggattcatggtatgaagcgcatgatacagaaccacatacagaacctgttcaccttctgctgttgccggatcgaagccgtcaacgtcattgatcgcgttttcacccagcgcccaaatgtttttgatatgttccggaaccagaacaacaccatttgcagcattcaggacatacacacggccttcatccaggtagatcgcatgggttgcatcgccaactttgacttcaacacgtgcggaggtttgcgcggtaatgatttcatcaaatgcaggtacatatgcatcaaacccttcaacgaatttgtgtaatgcgttggttgcttctgccattttttccagcagaggacggtttacataataaccatattccaggaaagcaatgttgttaaacgtcaacggcagagtagaacacgctttcaggatatcatcagtacgccagcagttatcataaccatcagtcaggaagatcagactgttcagattaccattatccgcttgcagatcggtagcgacttcaaccgccagttgcagaggttcaacgaagccagtacatccggtcggacgcagataacgatcgatagcatcattgattttgctcaggtcggatacagagctaaccttttcgcccacgaatacagaaccgaactgaccacggctggagaaatacagaatagatacggtatcatcctgtttaaccagcgttgccaggttgtttttcaggtgctgacgaatgcgcgggagttcgttatacatcgatccggatacgtcacaaacaaaaacgtggttagtcggggttggtttggctacggcgtttttgaattcaatgttagtgatcataattttctcatttataggtaaatttgattaaaatttcgtttacttttttgctaataatatctaatgcatcatcgcatccaaacttactactcaacaatgaaacaaaatcatccatcgttgttgtttgagactcgccaacgtcaaaagacagagcgtaggcaacaggatttttaatccttacgatttgaatagtatactcattcagatcaaaccgttcaagatattttcgcaaagaaaataaatcaattggtactggtagagtttgactaaaagttatttcttcccccagttgataggggggcatttttacacagatttcgtattccatcagtgatgactcttcatagtgtgttccagattacggaaaatttgcccgtgttcaagctgggattgaaattctccgcattcatcagagtaagtaaattcataaatgaatacaccgttctgattgccaaatttagcgttgtactcttcatacaaccacatcttgatcagagcgtctttctcttctgtttccagattataccagtcacgcccatcataagcaagcgcaatttgaggattagaccgatatcgagtttctgcgctatcttcggtttcccattcataacgcttatcatcatagtatgattcgaaaccatcacccatatgaccacccaggtcgcggtgtacttgctgtacaacttcttccgctgtcgggcaagtcatccagctataaccacagttaggaacacaatcacccatcatttcgcggagattgttgatatcagtcggatccttcgggaaccgtacaataaagctacttgatgaactattgctcacaaaaccagaacggattttcatttgatttcctcaaattcaaaagcggtgaaatgttttctttcgtcatacccaacagtacaacgatgcgtttgctttccggtaaacccgtcaaacacagttacacaatagtaatgcaacgacggaagcggtgtatgtttaatgtatttgatcgcgacgttcaggtcaacagtagaacatacacaatcacacgtttgctcaaaacggtcatcaaaaatcaactcaatgctatagatgttcatttttcacttccttcatgtttttcataacttcttcaaaagttacagggatctcgttgtactgttgcgattcttcatcccatacatcacgatgcccgaatgttgaactttttgcaatgattttttcattttcccatacatcaatagtaacatgatcaccaagataagggaaattaggaactttgttcagcgcatcaacgcagttttgcaatgattcagaaacatgggcaatttcagtgaattcataatcagcactataagaagctacgtaaatcatcaccaccccctaacgatgctaaccagcagtaaacccaggatccagaccacagcaaccgcacaaatacgggccattactacatttccgcgactagtccactccgcactaagaaacaagaggacaaaagttaacgcgtataaaaccatttcaataacttcggtaatcatataaacctcacgaaaaagcccctttcggggcttgtttaattaatgcccgaacacaccacgaatagactctgcgaatgcatacagttcaggatttttagctttcactgtttcgatttgctccagaatgtaatctggtttatatttcgcaccgaaccagcagtaagagaaagagcgatcccacatgaacacgttatagtattcaccgttgcgaacttcaaccatcacataaccaggattagaacccagcgggtaatctttcagaagattgaatttcgcgccagcaccagtacatccgttaaacaggtcattaaaagtcatggtatgttccttttgtcagtttcgtttcaacaaggtcactatactattctttgttatcctatgcaagatttaatttagcaaattcgccaaaatgttttatcgcttcctggtcgtatgcttttgcagcctctaattcatcactataagaaccgatatgcttaaccttaccatcaaccattatctgtgcaatgtaacgtattccggttggttgattgcgtacacatacacccttgaatatgctggttccttcctttcgccgtttcctgttctgagagttgcgggattggttcgcttcgcgcaagttatcaatcccgtcaccagcctcaacaccatttttgtgatcaatcacatcaggtagttttccggtcgcaacgtagtagatgattcgatggcgtagataccctttgcttttgaaataaacgcgggtatatcctcctttgatcttcgaaccaacttcctttccgatcaagtcggaacgtttatgcgatgttcgtataatctttcctgtgtggacatcaacagaaacagttttgaggaattcatcaattcctctctgttcttcttcaattgttcttaatccattatgtgacataacgccttcttaatttgttttgctatggcttcaatcactgggatggaaactgaattcccagcctgtttgtaagcctgtattttgctttcagggatgataaacgaatccggaaatccttgtaacctaaaacattctcgcgggcttaatcttctagggttcttaccttcctgcaataccagacattgaacaccgtcctttccatattgggctgttatcgtcccagtacacacagaatcaactgtaacggcctgatagccaaaccccttgccgtttgccttgtttcgttctttacgctctctaaagcccttccaggcacgatctgatatggtgtattgatcattatccggttcgagaatgtcaccgacccttgttggggtacgtggaggaacaggaaagctaaagaacaccggatcgcgaaagcagacaataaacacacgctctcttcgttgaggcaatccaaaatcttttgtattcattacctgataatggatatcgtatccttcgtcctgtaacagcctgtagatggttttaaacgtgttgcccttgtcatgggttaatagctggggaacattctcaaagaacagcacagagggctttttagcccgtataatgcggagtatttcaaagatgatagtaccgcgaggatccaacatgccctgttttaaccctgctttactgaacgcctgacaaggaaaccccgccaacaggatatcgtgatcgggtacatcgttttcatcaatggtgaatatatcaccctgaatattttcatcaccccagttatcagcatatgtttgttgtgcatgtttatcgatttcagacgttaaaaggcattcgaccccgccgaatgccttatcgaaaccgagcctcacgccaccaacaccagcgcaaaggtcaattattttcatacgtcgaaatcaacctcatcgattttgtatgattcttcgccaatatcagcccatagctgaatattcacactttttgcatcacgataaagagattgaccacaaagcccacctgtataacaagtttctgtaatctcgttaacttccaggcggaggctattgcgcataattttaacaacagccttttccattgccgaatctagggttttagtatcacccaatactacatctttaacgttcaaaataacatcactcattatcgccactccgtttcaattccgtgtttgtatgcgtcaacgcccagaggggtgatcactaaacacatatcagtatttttcgttggtgaactaaacgccattgatgcgtaacctttttgaatcagggaatcacgccctgatttactgggaacatcgttgaaatctaaatccaacatttttgacgagtatccgtaaagtttacacagaacatcaatttcagcgccagataatttcggatatgtcatttatagtacctcacaacatgttcagaatacacacgttcaatgaaatcattccagaaatcgcgatcaacttctttcggataaccagatacagccgccagcttttcaacttcacacatcgttgattctagcgcctcttgtacggttgcgaaaggaacaccgccagctttaaccattttcaaaaatgcactatccggaagaggatatacaatatcaccttctttgaaaatctggatcaattgcataccaccgcgcaacgcatgagaaagagctttccagtcgatcccgttgttggcttctgcttgccgtgctcgttccccgtattcatcccagagtttatacacggattttttcatttccgctacggtgatcgtagactggaatttacgccccagaacttcataaaattcctgacaacctgatttcagtgttttgtctgtaacgaatcgacaaaactcgttggtcgggaatcggttagaaatctcaccaactttgatgcgcttgccgtaattagattcatccacgttacccagcaatgatgtaccataccagtaatcgggaatcatttgtaacacatcaacaacttcacgcagtgccgccaggcgagaacctttaacaccatacttcgccgcttgcttacgaacataaccaaacaggccagttaattccgtagtgtagaagcgcgaacggttagcgcggagatattgccagatatcagagttagcgatcagcttgctatcatctgcatgaagcatatcaatcgccacggtatcaccatcacatgcgaggctaataaacttttgcagactgtaaatctgacgatctacgtcattaacatcgttctttgagtttttatcaccagttgatgtatcgatagacttcttcgcagtgcctaacaggatttcgcgaggatgagggagatagatccctttgtagtctttatcgcttgttggtgtttccagtccgtacaggtgagaaccgaatacggtttccataatcattttcatcagaattcaacctttaatgtttttgcgatcccgcgcaattcagcggtagtaatatccggaatgtttgttccgtagctattcccaaatacttttttaatcttatcacacaaatcgcggcgatacaccatttctttgtattcttcttcgctacgatacagttgataacccatccacccctcagcccatccggaattgcgcttgattttaatattagtacaacaatcagacccatcttccggtcggaaagatgcatacaggtactgacgcgcaactttttgtacgtaaagggttttggggttgcgattttgtcgctggtcactacggatcccagcatcatacaacgtatcaccaactttcacatcacttaaatcaatcatttacgtctccagcaattagttttttcacagtaatgaacgggaacaggcacacccaacgtttctttactgcttctgttgtatgttatcacaacgaatcggttttcgccacccctaacacactccagatccaaaatctcgcgggttcccttcgtgttaatgtctgcaacataatattcttcgttgttgacaatcactatatccgacataatcaagcgaggtttcatgcagcgtacacctctgattcatcgacccattccagatcctgattgagtgattcaatcagctttttatcgcgtcgggaaatgacaacggtagaacctttgtcagctttcacgatgatgtcaccagaagaggtgatgtattcaaccacataatcacggcgagggcttccgagtctgtcaccaactttaacagcacgtctaaccgattcatgagatttttcggtgaacactaatccatcacctacatgggtaacaataccatcaacagcagaacgagaattaacataaattttgctaatctccgccatgaaaacactatctctcagatatcgagcagtcactttatctaaacactgagaagatactttatctccgccaggatatactgagataatcattacatgaccctgaacacgggcggttcctactttatgcagaatgtaaaccattgaaccatcagaatctttagatacaaggatcacgctgaaagattctttgtgttgcttctgagtttctccacaggtaaaactcacgtccagaaaatcaccaactttaacagcacggggttttgctacttgttcacgagcactaataacagggatcataatcatttcctcacagtttcaaattcttcatcagatttccaatatacgttaaaattacgacaatcgtgttcggatgtcaacgtatatttttcatttgttttctcatcggtgataaccatagtttcattatcgattgagttaacaccgtaaacgaaaacattctcaccgcgtttgtttaaaaacgcatcacccttttcaatcaactgccaacaggcaacaggcaacccacctggacaaatcggacgggtaacaagacaatagggatgtttcataataagcctcttttgtttctgtaggcccaatatagcaaaagcccctgacctaagtcaagggctttgttttaaattccggtaaatgctacgatgatttgataatggtcatcgaagaatagatcccgcatcgcgatcacttcgtgcatcggtagccagaacgcgtctgctgcatcatcagagccgcccataatacgaggtaatgaaccatcgttattaggttcgagcttgatatattgtgctacagtcggttttgagaagtacaccgaacgtttcggatgatcaaacagcatcgaattacggatagaaccacgaataaccttttctggtactttaattcgtacttcttccagcaattcacggatcgcacaatcaaggaacgtttcgttaccgtttttgtgtccacccggaagcgctaacgcatctttaccaggcgcaaacttacgacggattactaacacgtggttattacatacgaccactgagtcagccgtgcaacagttcagagaatccggatacggatattttttgaacttgtcaatctctcgttgccagtgtgcatcttcatgggacaaacgctggaattcttttgtttgtgtccattcatcgataaaggaaaccgtagtgctaggcgcatattttaacaaatcttcgtcccagccttcatgatgttcccagataattttgcgtaaattggtcgaggacagatcctgatctccaaccttcacaggttcaaccggaatatgattccatccgaatgctttaagccagtaagaatctttgtctttttcgtacccgacgatcgcaattcgatcatttcgagtttcatcgattgccatacgaacacgggatttccatttttcctcgttatagaggtaatccggaatgtacgcgaatttgattctggctgcatctccaacatcaagtttgcagatagaccagcgagtgatcattgcttgacgctgtttagcggtcaatgggtttaatgtgttcggatatgcataagcagaaccgatcagaatgtaaaccgtatcagcaacagcaagggcttcccttaccattttctcatgaccatagtgaaaaggttgaaaacgtccaattactacagctttatcatatttgtgtttcataacgtgctccacgtttaaaggttaatcataaaacagacgcaattatcaacacaccaaacaatccaccaatgaaaccaaagaatagcgaaatgattgtagtcagtacgatctgttttatgttcattatagtattctcgttttagatgtcaagcccccaaagagggggctttaaaacattatttacgagaatcaaaaatcactttaccagcataatccgaacccattacagtttgaggtacgccacctttatagcgggtagagtagttcatctgtacatccagttctttccagcggatcatttccggtgtaatggtgcgttgcagggcggcgttggcttctgcttctttcttcgctgcatacagacgggcatcagcatcacgttcgttagcgattgcggcattttcacgggcctggcgatcagcttccgcttgttttactgcttgcaatgaagtctgttctactttttgtagttcagctttagcagcgttaacctgttcttcgcggatcttcgtgttagttacctgttccatgataacttccggtagggtgatatcctgcaagaatacctgtttcacagtgtaaccgtaaggccgtgcataatcttctacttcctgctgaatcgcaatttgcagttggttttggatcttcgcatcaaacaggtcttgcgcttttggtacggatttaccaaattcgcgaacagtggaaagcagtttttcggttacatacttatccagtgcctgatcctgattacccgcgttgatacggttgatcggtgctttgctaccgtcgaattgcagcattacggtcatatccacagtggatttaaatttatcctgggacggaacctgtaatttgtcgaacttcatcgcgatgtctttggtactgaacgtatcaaacgttgccagcgggtttacaatgtggaaaccgggcagtacgggtttcggtgatactttacccatgaaggtttcagttttaaccgtaccgtcttgcacaatggtatacatgttaggcactaaccacagtgctgcgactacgcccagagcgatcagagaggttttcttcgggttgttcacgatagtgtttaagttcatcataatttccataagttgttgttcaattcgatagttattctatcatcacatttcacgctgtcaaactatttttaagaaagttttgtcagcttgtagattgtttgatagcacaagcccttaatctcgtccaggatgttcttcaaagaactatctactgattcgtagatctcgtttgcttcgttggctattttacggagatacgccaccgtgtcaagcacattttcggtttttagcacaggtttgtatcttcccgtgattcctatgtggatttcggtgaatttatcaaccaaatcctgcatatcttcgtaaaaaccctcatatgctttatgttgtgagtatgaacctgttgcaaaatgtgcgctatgcatataggtaacggacataaggcacatgccaataaaggcatctatcttgcttgagttctcagattctgtaatttgtttaaatgattgcatgatgatccctttatgaacgatggatacttgcaaactcatacgcgaccctaatccctagctttgcgcattcggattcagatcggcattgtttttggtgccattttcgttccatgtagttgtagaatagttcgcttgtatttacgctgggagggatcgttgtgatgtatacttgaagggccgcattgatataatcgtcaaattctttctgaaccggacggtcggcggcgtgtgttgtgggtgtcatcatcaacaatccgaacagcacagccattgatatgcgtttaatgttcataacaattactcttttactcatagacccactataggtctactcctgtatatatttatagcaaaaacgaggccgaagcctcgttataatatttttgctgtaaagtcaatcaagtaatgtcataccaacacaaacttctttcgaaagcgcgtattttgttcacgttttctacgttttcgtcccaaccgatcacaccagctttcatacgtttcagttcctgacgtaaacgggtacgtacttttgaatcaattttctttactgcaatagaaagcattgcattcagatcgccatgagctttgttaccgtcgcgacacagattattatcaaatcgaatgtatgcacatcctgatttgtgtttccagttggttgagtaccaacgcaacccatccggatcaataccatgttgagcataataacgagaatactcttttacttcttcgatcttttcgttagatgaacggtcacgaagaggattgtatttcttacggtaagtgcgactcataatgatctccttttgttttatgcttccactgtatcagggttgttctttagttgcaagtaatgttttcgacaaagtgaaacatatttgtcttcggccccgatctcaatctggtcgccattagcaacaaatttgccatttgcatcaatacgggcaacggtagttgctttctttccacaatgacaaaccccccgcaactccctgatctcatcagcaagtgccagcaacatataagaaccttcaaacaggttcaactgaaaatcggttcttagtccatatgtcattacgggtatatctaattcgtcaacaacccgacacagatccatgacatttttcctggaaaggaattgtgcttcgtccacaaacacacaagaaactagtttctggctgtcgctataaaaatgattgttgtgaacatcataatataagtccatatcaggtgtgatcatggtacatgttgcttccaacccaatacgcgaagagatactctgtttaccttctcgcgtatcaattgctggtttgtacatcaggatccgcataccgcgttcctggtagttgtatgcatcggtgagtaaacgagcactcttgccagcattcattgatgcataatgaaaatatagtttagccatttatcctctcaacaaaatctggggtattttggaatttcccttccccttcatggtttttgcatgttttatttgaacagtagatccaccaatcccactcatcataagggggtttggtaatgttcattacacaaattaaagggaaatgacaatcccgacagcgaacattttctataatgtttgcgttagccatgtgtataaccgcccatttcgctatcttgtgcttgatgaatatcaagataccacatattgattttgcttttcagttcgtccatttccttactcagacaattgtcaacgatacatagaacattaacagtttctttacgttgcataacgtcgatgttattcgctttcatcgcttgcgccaatgcattacaggttttaaccagtgcggcgcgttgtcctttgattacggcgatccgtttgttcgctttcttaatctcccgacctgctttgataggatccatcatgattaattcgccttacgaggatcgaaatgaacgacaatgatcgggtaatcgccagtcacctcattaataatgcgcttaatgagttcccagtctcccccagcgaggccagcaccgattaaaggtgtgatgataggctttccagtcttaacggcgtcagcaagccctacagcctgtttaaaagcattgccgattgcgtcataatcgacacgcggcccaggtgtccagaaatcatattgagtatatgcattgaaaacaatgttgcctttttcgccaatgtaaacagaacaagttccgagcttatcacgggaaccttttaacgtattggcatcaacttgaaatgcaccaggaatacgatcgcggatttcgcgagcaataccagcgcccatattgcaatagcagttgcatccgtggatcaaatggccttcaccattcagatacatattgacagcattacctttcacttctttaatgatcatttttattattcctatataattcacgttcaattagcatatcgatgaaatcagtaatatcatcaaaccaatccttagtttcttgagcatgagccaaatcaccatcatctaaaaacttttcgcgagcatcagcaaacttatctaactttttatagagttttgctttgtctatatcattcataaattaaccttaattattaaaagaacgtaagaaaaatacgtaatgtcaaacctgtttacctttccgttcacggcggcgatcttcttgatgacacatatataaaacaccaccaaaaattataaaaccgataacaacgcctataaagtatccagcactaaacatagtcatcatccccgcaatagtaacaaggcccagtgctctcatgcttaccagcattgtacgccaaaaacaccacaaccgccgccataataataaaaatccagatagccattagtaaagccctatgccagcattaaattcatcaaccaaataagtacggaacttttcacaccgttccttatttggcgcttgtttgcatagattcatcattggttcagactgcaaaaactctttttgtttcagcaacttaccgcgtttatacaggtgagcattttcctctccccacatataagcaacatctaactgttctgcgatcacttgcttacataccgcgacatctttgatatcacgattgttgcataactcatccaggcgagcatcaccagcgtgagcaaatccagcaaccagagttaaaagcagtgctaactttttcatgatgattccttattcatcctcttcgataggggtataataatgcgcattgcagatatacgcaagaacttttttcagagacatatcagagaatgtcggatcctgatttcgtctcatcccactaccagtttcaacagcccaacgtttgttagctggattgtatgtcagccagtagcaatcccattcagacagagtatgttcgaacagatcgaaacgcttacgcccatttgcttgcggccttacaaaaggttcaaccatttctaaagcggttaacactcgattaatgttcgaaccgtcttcatccatcgcgatccgcaaacagtattggttaatgtccggatccataccatcgatacccagaccgatagattcgaaaaattgtgtcgccgcgtgataagacacactagaagaacgatattccaacatcacggggatcttttccccatccttgacgttgttaatgatatcctgatcgataagttcaatcaggtctcttttctccttgttcaaggtagaaatttcttcttgcagcggggctatctgtgcatgaagttctttgatccgttgatcaattacggttacttcgaaagctaaatttctcattgtacccattccccgtttttgtcaatgtacatgatccaatcagcaaccgcccaatgggaagtattgcctttcggagtcgctacgatgtaggaaccagctttaaacagtacgcgtttagtttcgttcaggatcaggtcgctcataatgtattcctcatttaaccaaagtgaatcgtgattcataagcatcgttcgggcgctcatacacagtatccgaacttgtgatgacagtatacacggcttctttcacaagatccatgattttctgtgattctccccagacattgatactaaaatacatcccatttttaggaatagggttgtattccatatcataatacatatccatgagttcacaaatgaacaagcggcgctgttcatcatcataagtgaagtacatgttaaagcaatcaagagatttgctcaaagtaatttctttaatagctatgttatcttgtttgctcaaatgatcacggatcgcttgcacacaacgcagcaggttagggtaatcatatttttgtgaaacaatgacttgatgtgaaacgctcataatgtattcctctcaattagatgcactcataataaaaaagcccccgaccgaagtcaagggctttttgtcaaatgatttgtttttcttctaacagcttcgcggttgtattaaccatacgagcataatcacgggcttctttctttgtatacttgaaaccagcgttatagctcgccagcgcctttttcaagtcgcctttgtggtaatcaagccagtactccagttcatagatcgcatacttcgatccaccttgaagagtttcgagctttttgattactacgcgtttaggatatgacttatccattcgtgcgctggcgctacttgcggtaacttgccagcatccataagcgtgatggccttttttacctttaccgacattctcacatgcgcgagactcgatccaggcaatagccgctaaatgatagcctaaacgtttagccttatctttttctacaggttttgcagtcttcaaatcatagttgtgtccaactcgataagcatactccaaaacctctttctgcttcggtgtaatgttatccaaatccttgatgtaggatggagaatttttgtttgccggaggcttcacagtagccttttgtaaaggcaattgatgagtaggcaaatccgcaatgaaatcccctagcggatccgtcgcagcgttgccagaaaaagagcacaagaaaatgctggcagcaataataattttcttcattttaatacctatgttgcaaaaagaggggcaataatacaccccactttatatttatgcaactattttagatagttttcgcgtcacgtagtttatcggcgataaactcagcaatgttataatttgaaatagccttgttaggatcgtatagcgcaatgatttcatctaacgataccataacggcatgtttaaagtagacgctccagctagtagtaaggatctcactgttgtcaaatccacaatcagggctgaacaatgcgcggtatttgtacccactgtatttcgtcagacgatttgtgctgtgcgcatcactggtgatcagaaaagtcccctggtgagtttcaacaacgaaaaagtatccgaggcgttctttgttgtccagcatcttttcaaacttgcgatcggtttcttcgcgaacaatacgagaagtcagcatttccaacactttatcgtattcgggccaatcattctcgatcacgattgcatcaaacgggttcttaccattaatcccgcgcccgatttcgattttcgtgcaaatttcgttgaacgttttcaaatcttctggtgtcagttctttaagatcgctcaattttgctacataataacgtttttctagtttcattttacggaaacctcaattcaaaaataatttcacagagttaccacatttagggcatgtgataaattttttcacgacataatcagcagcagagaaaaatccattgtaaatcgattctctcttttgctgtatatcagatagttcgtattctaacccacttttacagcaactacaaacagtaattagtttttggctatggatgacagtaatcatatacacctcacaaaaagggggctttcgcccccatcattagaaattgtcttcgacaaacgccgcgagacgggaacgatacactgtatcaagaatgatatggcttgagtgttcgtattctttcagcttttcaacagcccatacaaacccgttgtttacggcagtgtttcgagggttgtcgatctgcttaatgttcccgcatagtatcagaagtgtgttctctccgcaacgagaaatgatagatttaatttcatggttgctaaggttttgacattcatcaacaatcagcacagaacctttgcccggatccggatgaccaatactgcgaccacggaaataatacaggctagggaattgcaccacccctttttcaatcaaaccttcaatgtatttttcagattccggattatccttaaacagaatgttcaggctagtaatacaaggttcgatagaaggccggagtttttcgcccagtgtaccaggaaggaagccaatttcacttgataacgggctatctgacttcacatacatcaagttagcgtaatgtccactattaaccaggtgcatagcaccggaaacagcaagcattgttttaccagaaccagcgccgcccataatggtagcaacatcgatttcattgctcataatggattcaacgaaagccgcttgcagagaatcacggggctggatagctttcatgagtttgcgtttcatcgcctgttcgtgcttaacaggtaagacattcaagcaaatctcatcagcagtcaccacacgcccgactaactcaccatttgaggtaatgtactggttaggataaaaatcttcgtcaggaagcgaactgtaagtgatttgggctacattatccgtatatcccaacacttccacagtatcccagaaatcagggatctctacataaccggaatacaatacatcgctatcttttaacgtatcgtcgccagtatactgttctaccttacacccacgggacattgcgatcagcaacatcataatatcgcgagtaactaaggttgcatcctgctgcatacaagtttcaatgattcgttcgtcttgcttgtcaagagcaaacgttttgtttccgacataatcaaccactttaagggtgatagtgtcagacagtgctgggtttgtcaggtttaaaggaatacctgatttcgtaatcgcatcatatgactgaccgaaaataacttttgacagaagccggatcgccaatcgtgcttcgtgcgctgttcgttctttcgttttcaggtgatctaattcacccatagtagcagaggtaataatgatttctgtaccaggttgagtgaatgaatagattgaataggggttactaatcaaaacattggtgtctaatacgtattttgacatacattaaccttatgtggtttcgttaaaaaatgcaccgaaaacctcttttgctttccggttataaacggattttgcttcttctggagtgttatagtaccccaaaaattttctttttccatctatgtttatctgcgctttgtacttcccattggctttatgataagaaacacctttcaaccctgtactactgtttgagttacatttctttttcatcgcattttgctggttcgtcgctttctgtaaatttcttgctgtatctccattctcaacaccatatacatgatctacgataggaggaagataaccattctcaacgtaaaacactattcggtgtcgcaaatacatagaacctttaaaatgaatttgggaatactcgtttttgcttccggcttcacttccaggagacatagggccgcgctgaactttccaatacactttacctgtagatgtatcaacatctacaaaattcagaagagattcgatcccttgaatctcttcatgtatggttcttgatgaatagccatgacttttcattacatacccagcgaaattacgtgaatatatgctaatggatgtttcttttgtacacaatgcatgagtgtattatacacaatgtccatgcgttcattgcgcgtaagatcacactcatcaaaaataaggtttattgcctggtgctctattcgacgtccacggaaatgattaagaattgcccctttactggtcaatacatcacatccggtagcaccatttagctgtttggcgtcttgtgctgcatttaacgtatgcgctacgtaaatgttaagggaactatgggaacgtttcataaaatcaaacgcgcctttagtcttttgtgttcgtctacccagatccagcctggtttcgaataccataaaatcgttagggccgtaattatgcgttggttcttccaactctcgcataagatgcatcttacgacattcttcaattgtctttacataaaattcactattcatgttttacctttaaggggccaaagcccctttgttacgctaattccacatgcggggcatcaatgaattttgtttcgatcggaaggttcggatcatttttccagttgataccaaaacgcagtttaacacccagttcatcacctgcttgtttaacagcattcaggacaggcaaccacactttagggtttgtttgccagccttgaggcaacacgctaggatacagatccaccgcatcacccgtgatgtgttttgagttcattgtttgagatacacccttacggacgttctcgcgctgttgttctacagtacgcagaccttcacgtacaccaaaatcaacaggagacagttgcagagcacgttctacgactttcaccagttgaggtttaacgcctttaaggttgttaaggcttttttgactgaatttaaacataaaatcacctcttgtaaaaataccctgtttgggtacacagggtatttatggtttaagaggttcgataattaataatcgtaaagatcaccgaagcattcttcaaattcacgtttacgttcaatttgctcgtttctacgctctttcatatcaggaggaagacggttttcattgacttcatcaatgtaagcctgtgcatcctcttttgttagaaagaatgcatggaaattgtatccgttgtacccgttcatactacgatcttcaagagagaattctgtgtgacagtcccagtctttgtacagggtaatacatttagcaaacagcccaataccgcgatgaatgtatgggaatccagtaacaatcatcttgctacccatttccgcattttctccgttcacacagaatacttcatacatgatcgcacctggtttaacatctttcttaacagcacgtttttcaaaagcacttttcataatatattcctctcaattggtgtaactacagactactagtttattttctgaatgtcaacaaggtttatcgttttttgacggaaaagttagagtgaacaaacgatcatgaaggttgtcgatccgttcacaagcctgtttcagtatggttttatcaccatcatttgttgtttcaatgcatccaagttcatcggcgtcaatgttcactacgtcgctcatcaatgaagcaaacacgttagcatcaggatgtaacagttcttcgatttcggccttcatgccgtcgtgttcagaaaggatatcaataatatcacgggttaaatctccctggtacgggaaccctgtttctaaatgattgatgatcctttgtgctttccgccattgccatttctgctgttgccggaatagccagagaatattcatacttctcgatcaacgattccagtgtacgcggttttacgggaatgtcaatcattaaaggattaattttcatttcaattccaccgcgtatacatccaattcaggggctttgtgtacgcgcatatctttaccacatacagcataagccggacagttacggcaaccgttatgatccttgttgccaatcaattcatgacggaatttcttagttttcggatgttcccagatatctttgataaagtcactggcttccagtacgttaagcccttctgaccatccaccctcgacccaacgttcagtaaaggaacaagggaagaattcacccttctcgttgatgtacgagctaaacatagtagcttcgcaatcttcggcgtattgcttgtactgttcgaagttcgggtgtccctccatcgcttcaacgaaagcgggggctgaacagctatcgaatccaaatcctacaccagaatctaggcaatattcaacaagttttttatattgttcgcgggtaacggtgtcccagttcttaccgcgtcccttttgtttcagtcccaggaacacgatcgcgttaacttgtttcaggcgcggatcattcttcacagcgtcaaccacgttaaacgcgtcatcataggttttagagctaaccatgaaatgaaggttgatttgctgttgtccggcttctgcaagattagccactgaattaaacgctacatcgaatccagcatgtttgtatactgataccgcaacagccccagcaacagccgctaaacgcgctgcaacgtcttttgatacatcagcaatggtaaggtttggtacaatgcctttagaacgcgcataggccatcatatcaaacatatcagggtttgtttgtccctgtgcatcagcaccgagggcgcattgtgttaaccagggcattttatcaatgatagatttgaatgtatcaagatccatattgaaaccgttagggttattagacttgtagcagaaaccgcaaagtttaccagcagggccattgcatttagttgtgatctcgatatcgagaataaaaggaaaatgactataaataggatcgtcagcaggagtttttccccaagtcatcatatgacctgttttcatatcaaaattaaaattaacctcttcggaacgatagattttctttcctttcgcttccagtagaagtccaacaggcgttttgatatgtttggcgtttactttaacgtgtctcataggaacctcataatgtattacgtttacagaatcacaaatgttatagagaacaagcactattatggatcaagaaaacctaaaaagtcaatgcttgcttccgacgatttagggaaacactatttcagtagttcccgtgatagtcatttcatccaagatcagaaggaaaatccaggacactacaaatataaagtaatcgtatctgggttgtcaagggaaaaggcgatgaaacttgagaaaaggttacacgaaatctataaggtggacaagaacccacatttttataacaaacacatacacaacagtgttgatttttcatgtacaccagaaacaggaaagaagatttcgcaaacacaccagaaatatgcagcaaagaaaatttcagaatcacataaaaggcgattcaaggaaggtatagcatcacataaaggagagaataacccacgatacaacgatcatcggtcttataaagagatacacggagaagaaaaagcggatactatacgcaaagcacaatctgaatcaagaagaggaaaaggtaattcccgcgcggttacgtggaaatttacttcccctaatggagaagaatttttagttgaaggagaatgtaaaaagttttgcaaagacagaaatatttccatgcgtaaactgaaaacctatctgggtgaagtcatcacaacatgcgataaaccctacgatatctctaagaataccgtaggatggaaattagaaaagattagttgaatcttcttttacgttcgtcagccagttcttttttgtacgttttaacgtacttcccgttaagggtacgaagttgttggaaaaccttgttgcacaaagcacgtttcgctttgtattccggcgtattgcggattgattcgatcgtcatacccatttcgtttttagggtacgcgctcaactccctgccgatctctctgtgccagttgcttaactgatcacgctgtgctttgtactcttcaaaagttaacattataactgatctccgtaatcgttcgctgcatcttcgggggttgcttccagtcggtaaagctcaacggctaacggactgggtttgatttcgcggttcaggatctcactgataccgcgaaggaattcgatataaggacggaatctcattttatacgtaccgcgttaaaagcctggttccggagatcatacgctttttcaagctgttcagtagtgaacagaggactatcagtgttagtggtgaaactgcaaatggttttgttgtcggcgttgacttcttcgacaacgatttcataaccccagatcccgctgtactcacatttcacgttccggtacttgatgtaaactgctgcaacatcttcttttttgtagttccggcttttgtagatgatttccatgatatcctccttcgtttcgatgtgtgtaatataacagaacagggttatcgagttttagcaattcgtgctaattataccattttcttagcgattttccaggaggctttgaacgccggaacatcttcaatatcaacccagaaaccagatccgaaaccatcactatagcaagggcaaccgtcgcagtagttttcccaggtcatcacttcaccaccaacagaagcaccagtttccatagcacgtaatgcatcttcaaccttttccagtttttcggcgttgtcgtcgtaaatgacaaagtaccatttacctttgtattcgttaccaagtttgatagcttcgcgaacaagtttcatgatgatttcctttttgtctgtttcgtttctatgtgtgtaatataacaaaaccccctcaccattggcaagggggttttgcaaaaattatcgtttgattggggtattatctataacccgttgaatttccgaacgcatcgtagaatactggcacaattcggtaagcgcccgatccaggtgcatcatagcgtaagaaaactcttttccgcatttgtcgcatctagcgtataaatgtaaatgaattcgcccgatcccatctacctgactatatttctggaatatgtaaggatctgcacctcgatagccagttgcttgatgcttacactctcgtttgaaccatgacattaataatatccttgtacgttgaagcgatcacataacaattttcttgtttggttagtatcgctttggatagaatgcaacatagcgctgatcatgtttaggttattttgcatcatttccgcgctcatgagaacttccatacgcgcacgtaagcgtttattttcttcttccaactcaaccatacggtcatatgctttgatgcgctctaagggcatatcaggacgctctttgagtacgcgagcacgttcaacctcacaagcatgatttgctttccagtggttcgattccgcttcaaatttattaagacggcggatctcttcaaccagctttttgatcatgtatggatccatcatgtcgatgaatttcatcaagcagttggattttgttttgttgtcagcaccagaccaagaagaattatacgtaactgtaaacgcgcggcccatttcatcaacaacaccgatcttgttatcatcggtgattgtagccgcccatttctcccgcatggctgtacaggttccgctggcgacattatgcaacttgtttaatgtcgcatcatcaaatacaatttcatcactcatatatgcctcacatagatttcaaaatacgcagaagtgcgttagtaaagatatcaggaacacaaccaccaaacaacttatgattcatcagcgctaatttcatgctgtgattttcagtatatcgcccgttatggatcccccaggcaacgacattaccaggttcatgaataactaagttagtgagagtaacggtcatgcgctctttatcattgatagagaatgaatagcagtaaccggatccgatgtcgccgtaaaggttaaggtctttcaatttcccttgctcatgcaagcgtttcatatgaactgcacatgcatgattaatagtcatttcttcatccctagcccagtcatcaataccagaggtataacgaatattgaagtagttagtcagttcatttgatacgctcattagaaacctcacttttataaaattctttaccagacccattacagctactgcatttgggggaacggttgttatcataccgccccgaaccgttacatgcaacacatttccttaatttccagccatacacgaacctcatgtaataatcggttcgtgcggccttgcgttcatggaaattcattcgatttctaccgagtaaccttctttacgtttttggtcagcgaaatttcttgcgcctccccaatcgtaacaggttctacgaccaacttctgaatcattatgaaaccaaatcacggtatatcgctttcccataataacctcttaaactttgttgtaaacctgaaccaaccacatttcgatgttaggcgcgtaagtaacgtttaccttatgcattgtgcggtatttgtaagcggctttgtatgcatcgagttcagtcggaacacagaaagagaaaccgttgtcatagcgttctgcgttagaaacttcacaaccaactacagcggcaatatttttgttcatgttcatgatgttttcctttctctgtttcgtttcgatgtgtgtaatataacaaagcccctgcactaatgcaagggctttttgattattttggtaatttttcgattgttgctttcaactcattgattttattaaagagttcatcgctatatttcatcaactcactacggcgtttttcggcccacttgatcaggaattcaggagaatctacaccatacgtgtaaccttctgcactcagttgaatacgagcacgggaaccataatcaacagaactttgttcaatgagaaacttaaccgcatcaagcagggctaaatcttcatgacttaccatgattccttctgcctttggaagatccacaacttcatcctgaatgagttcacggcgggttgtttcttccagtgtttcatgattctggatcatcgtttcgaccggatcctttgccacggctggtttgttttcacctacttcttccaaaaacatcaacatccatccaggaattttagtccggaaagaactttgtacttcactggtgcatgaatttcccagaatgtggatcgcgttaccatgcatatcagctttattgatatagataacgttctgctgttcctgtcggttgctaccataagaaaggaagcggcgtaacgatgtgttatgaccatacttccctaaatcgatttcagccaggcaatcaatgatcccacggttagaaaccttgtaacgcttaccctgtttgaaaaataacgattcttccaggtgagtaggggtaaactcttcataaagaacatagaattctttaggaattttgcgctgaaccagactcagtttacaattattagaaggaacaataacagagtgaatgtttccttcggtatcacacatagcttgcattacttgcggatagtaaagatggtctttcttgcaagtatagctatggatacgactctgacgttttttgaagtaccatttaccagtttcaaaaggcgctgttgtaaaattcattttgcattctcatacatagttaaaattgcttgcatatgttccggtgattgtggaacccctgcaaagttcactttcaaaaagaaattcaaccgatcttttatgttgcactcatcgagtccaagcgctggcaatgaaatgttttcaaaagcacgttgttcatgtctttccatttcaccccaaaacaaacgggaaccgttaggcatcggtattccaatttcattgttccagaatttcatgatagttgtcaagcgttgttttccatcaatgacttctacccatcgagattcgttgaattcactatcaaccgcgatcgcaatgataccgcaaggaaacccagtaatcaaagtcttcatgaaagcatcttgctctttctgcttccacacgtagggccgctgataggacggattcagatccagatcgttgttcttgaaccaatgaatgtaactaccaaccatgatcgcatgatcgcgactttggaaagtttttaactcacgaatacggtttcttacaatttcatccgacattataaaatcaccatccagtatataatcgtaatcataaccgctacggtgaaacatattgcagcgtacacccgcgcattatgaacctgtgttttcaattctgcgatctcttgatccttttcgctttcaaactcttcgcgagtaccataatacccaggatcgttagcagttgccaatctaaccgcatctttttcaaccagcgttgcgtaaccgctttttatttgtgtcgccccgtaccatccaccccgatcgttgttaatgatcagatgatcgcctttttcgttatgctttgattcgccaacaacaataacccgcttaccattcataatatgatcctcaaaggggccgaagcccctatttcgcgttcttctgtagataatctaacagatttccgctttgatgtaaatccaaaactttagaaaacttctctgcgtttctttcgtttgtgaattcgtcgaaatgccatacaccatcatcagctattaacgcgccaggtgatgaacctgtttctacatcacgggaaagcgcaagccccagagggtgtaagatttcgcggttaatgcgccaaacaaggcccatttcagatagagtattaaaatcgacgtatttcatattatgcctttggtttcacaccgtaggccaacataccgaaacgatgatcattatctgcatctttaaacagaacttcgttaccatcaatgcagatgacctttgcttccggatcgatgtatggaagcaaccacaaagggatcaggcgtaggccgctatgttcatcccagcgactgaaattaagttcttccagttcatcaagggaaaactcattaggatcgatataacggaaccatttggtatttttgaggcggtcagggaagtttacaatttcttcatagccgaattcagcactccatgaagagtaaacagtgacttcggatgctttggttaaaacagcatcgcgaattgatttgcatatatcgattaaagtcagttgattttccatgatatatttctcatcttgctaaaattttaggcagtagttgccccatcgttttacgtgcatgtgacggaatctgtgagatcgggacatatttaaaatcatccatttcacgtatagtccgtccgttcttaacgaaagttgatgcacaatagcattcttccgctactgggtaatcttgccctacatagaggaataaagcaaggttttttgttttcgtgtaatcgagaacacccaggctaaccaattcctccgcgaacacttcaaatcctgtttcttcgaagcattcgcggatcgccgcgtcaatatgagtttcgcccttttcaacatgccccttcggaatatcccaatggggcgtttcagtggcatggcccatcaacacggcaccatctttaacaaagataatacccgctgatagttccatttattcacccgcaaaagcgttatcaaatgcttcaagtgcgttgttagcgcgagcactggcttttgtcacaccagcctggagattttcaaagaaggtatgtttccacacttcgcggcgactggattcatgttccagactgtttttgtgatcaccgcgaatctgttcttccatgtcataacggtacagatcgagttctgcgtttaatttctgttctaatgcctgtgcaaatacatgttcaatattcattttgtatagcctatttcagatttaaggttttcgagggtggagtgataaacaacattcccttcgtgtcgagtataccatacttttccgttctggttacactcattcattacattttcatctaaaccagggatcggcttcatgctgggagaaaacgcgatagacatcatttgttccgcactatcagcaaacccacaagggaaaacagatccagttggtttatcaagatacatcaactctactttagccatagatttcttcgaaatcctcacaatcaggcaaatacgtttcacagaaggtgcaaagcgtaaagaatgcaggttgacgaataccaggattatccggtagatacatccagaaggtgttagcaaacacgatgaatgttttcaggttttcggtggtaatttcgctaacaccatcatacccggattgattgatcgcgcgttgcagtggcacctcgtactgttcgcaatagtcggcataatgatcgcttgttacaaggccattagccattttaatcaaatcgacgattttcatgattttacatattccactttaacaggttttgcaacaaatttatctttggtgcgcccatgaccattacacaggtcacattctttgttgaaatctttcatatcttcgacccatccagaatctggcaacccagacggatatgcgttataacgaatggtttcataaccttttccgttgcatttcgggcaaacatgaggacgttcttttttagcagactctgccagttcgcgaagggtggtagaactaccataagcccgacacatgttttcaaagtcttttaaagtcattctataaacatcaatgacgttatattttttgccggatggtttagccataatatatttctcacttaaagaattttttgatgaaagagatagcaaggccgataccaaagaaaattaagtaaccttttccgtcaccgtgcgccaaaacatagagtgagctgccgtatgcgatgagttctgcgatgttcattaagtttctcatgatatcctcctttttctatattaagtatcttaccataatataaaccaaagtcaacaacaaagttttatcaacccacttatcaccagtcattagtaatcccctacaggttgagacgccgcaacactcaggatcttgaaagtgcaattgttccattcacaataagtttttgcgcaatgaacacttcctttcataacaaacccgtttgagaaaattaaccagtaaagtttcatgatagcctcctttgtttcgacaaggccaatataacaaagcccctgcacgaatgcaagggcttttttcagtttttcaacatccaaagttgcggaggacaatctttagaagcgattagacgatccaggcgggacataacccgacgataaccgtcgtattcaaaattaatttttggtggaacgtagttgacctggattgtttttctgttagctaaagaaacatactcagggatcaccgttcgcaaccgtatagcgatcactggcttctcttcgccttcgttaaagaacatttgaacagttataggacaagcaaagattttaccatttacccgacgataaacaataacttcctgtgtcccttctgttttggccttcaccgcgtaggttagaacataacacgaataatgatttgctagactcatcatgatatcgcgataagtttcaatatcttttttaatcgatactgaacggtctttaaagcgatctgcaatgtggtcagcagtagccgctaccttgattgtataccagtcacctaacgcgctagtaaacgcctcgctaacttcttttcgtacactgttaacaagatacattaaacgtgttctgttcatataatcctcactgatttttgaagtattcgatctgacgcaaacgcttttcagcggcggctttcgaatcgtattcaccaagttcttttgtgcgatcgtgattcaaaacaacccacttatcgccacgctgttcaatgtgttctgtaatatcttttaacgacttatccagatccagtgattcagcctcttcacagataatagtcaaatccacgggcagtgtcaacaacctttttactccgctgatatcatcaagcatcgaatcgtatgcaagggttacgtgcggtttgtaatccggataatcgtatgttgcgccagcatcaatagaatctttgaaacggctatgcaggtattcagattccaggatccctacgatagtgctaccgtattttgtgtcccacttttcaacatcaaccagtttagcaggttctgtgatgtcctgttgcgggaacaaatcaaccgttttccggctgtatacgatcgttgtatgcatcttttcggctgaaacagcattctttgtgatacctaatgtcttttgaacatttttcaaagcctcacatgaagcctgatcgaatttagcacacatgtagataccaggatctacaacaggttttgtgatttcaagaaatgatttcataaaacaccccaataaaaaaggggccgaagcccctttgtaataaatttgtttttacgcttcttcgccaaaggcggcttcatcttccgcgcctttttcgacttcaacggaagggatcagagcggataccgcgccaatcactgcttctggggttactggctggcttgcgtcaatacccagtaccgaacacaggtcggacagaagttgacgatgaacagagagttcactttctttttgcgcgattacttcgttcagatcgaatgcgcggcctttcagtaccagtacttcattttgcagtttttgaatatcagacattttattacccattgttaaaatttaaaagtatcgagcactttgctctttagttgtttcaaagtaccttcgttagtgatgatactatctcccggttgaggtgtcaaacctttttccgtggaatgttcatcaacaattccggtatcttttacaataaacacaaacttagcacccaagcgtttcaggtatttatattcgtgttcctgacgacagtcagttaccagaagatgattgtattcgtcaccagcatatttattgacgaatctttccaatgtgtaacgaacccaaaccgtgttatcatacttgcatacgatatcagttccaaacacttgcatcaagcgtctgatactccagggagtatcgttactcataatcagattatcaatatcatcaggactataaacaatattgtatccacgttctttgaggatttcaagcccgattttgaaaatatttagaacatcttcattagacatcacaagaggtttctctcgatcaccttcgtaaaaaatagcatccggatcagaatattttccttcaaccagactacgaatgtatggtttatcgtaaccatatcgctgcattgctactcttagcgttcttttgataccaaatgccagtgcttcacactgaacatcattgtacgcctcttgaataaatttagcaaccgtatctttaccagttcgcttttttccactaatcacataaatcattagctcattctcttttgagaagtgactacttttccgtcaatttcaacttccatatgaaggaagccaaaagttgccatacacgtaaccgcttcatcactatcgttagtataacccaattcaacctcacccaagtttgttgggaaggcaccataaaatctaaatgtggcgatcgttttcatctgggagttatccaggatatgcacagcgaatgattgcttaggatcatcccacgcaacagagttaaactcgttgtaatcgtttgtgctcaacatccatatgtaaatcccaagatacgatctcatttcctcatcgactacaaagcggatcatcaaaggatcaaactcaaaagccgaaccaggtactttacctcgaaccatcatatttgcaggaatatcaactgctgggaggttcattgatggtagtgtaaccccttgaacttgtaaagtcaaacctttcatgtaactgttatcaggaatatcaacccgaaagtttgtaggtgagatttggtttaaaatcatttctgtagacataggatctcctttcctctatttagcggggaacgggatcaaagcggcctgacggggtaatataaaaatttgaagaaaatgcttgaccttttaaaatctttgatctataataattattaattaaaattttatcaaaaagatctaacaagatcaagtaaaatttaataaataatttatcaaaaatttttagatctgatcttgaattcataaattttatgatctataatatattaatattttattttatcataaatttttatgaagatcaatacttagatctaataaattttatgctttttctgaaaacttttcctttaccccgtcactaaatactggtactatgttcccatattggaaatcaggaaaaacaaaatgactcacttgaaaaaattcaaagaatttctgaccgaaggtaaaaccctcgctcgtaccgtagcacgtggtcaacgcgctaaaacttccgataaacattcaatcggttttcttcacttcaaacatggttctgatttcgaagttttagcaccggattctcacgatctggcatacttcggtaaaaacattgtacgtttgaaaggtatgactactggtaaagttcaagcggcttatgtcgattgggctaaaggtactgtttctttctacagtggcaatccggatgatgatctggatttcgacaaaccagaaaaattcaaagctgctactctgtatgaagaggcggaagaaaatctggatctgtataaccagttagcagaagatttcgaaatcgagatccctatggatgaagctctggtgaaaggtaaagtttacaaactcccaagcaacgatatgcgtcttctgtacactgggcgttctaaaactaaagcaagcggtgaatatgcagtgtttaccgtagttgatgcttccggcaaacctcgcctagtatctggtaaaaaattcacccaagaatataaaggcgatatggtttctaaactggttctggctgaatccgaagatctgaatgaagcggctaaaggcattcgcgaaaaagttattgctgtgatggtgaaacgcgggtttaacgaaaaagatgcagaaaagatggttgacaaaaacctgaaagatgctatgaaagttagacctggtgcgacccctggcaaacttgcagaaatagttagcaccctgtaaaaataaagccccttcctttcggttggggctttttgattagtatttgctccagactttttttgcgccgtaaggtttccctttggacataaattgctgagtcggtagccaaacagctttcgcccaatctttaggggcaatctctgctaatggtgatttgaggtgtgatggtagatatgctttgatcatttctgttgcgcctcgcatacctttcacgttaccccagttaattttaagcacggtcttgttagagaggcgtttagtggatccgtaccctcgcttcaataactcttctaaaaactcctgtcgtgctctgggtggcgcatagtgcaagttcaaaccatagaacactaagttacccgctttcgatcttccggatcctaagaaaatgatcagtggaaatctatcccaatacggcagggtgtctttatattttgcatcatatgcaaacgtgtacaggcgacccgttgctggttttgccacacggtgtgttttgatactggttttgatgaaattaccaaaccattctgttgaatctttctgtcgctttgccgccgatacaccaacagtgatctttttcagactattacggaaatcgttgatgatctcgatcccgtgttttttacggtagtcattacgttttttacgggcttctgtctctgcggaacgtcgttcaatctcatcatcaatctgttttttgtaacgatgcattgactttgtgaacgttgcgtagtttaatccctcagaatcggcaaaacgtttagcagaaacacctttcgtttttgccttacggaatttgatccccagttcaacccaatcactcaatttgcgtttgggtggtgctttgggtttatcctcttccgcgatgatctcaaactcaaaaataaaactcatgtttccctccagggattactgacctcgccacccaaaaacttttttgagtgattcttctgttacgattttgaactgccagcctttttgacggcatagctcatttgcggctttccacttatcaatattaactgtataggtgtaaagagcatcaataaatttctttttattgtgtacgttgttgtttactggcttcggtggaggcatggtttctttaaggggcttaacctcccaaagatatgtagtaccattttccatttccacatagaaatccatgtaatagcgtcttctcttaccgtctgcattgcagaaatacgggatcactatacattcagaattccaacgttttacgtgtgggtttttatccagccacttcataacgtagcgctcccacgatgacctatacgtaatctttcgcggatcgcctttatacttctgtatgttttcgggtacaaacgaccctttatacgtctgtcttccagccattgcgtaaatcctaaatagaataatataacgtttagataggggaacttatcgtgctattttcatacttcccgcctgttgattacaaaggcacccagacaactgatattttccgagactatcgattttattttaatcgtgtgattggaaaatataaaacccgtagttaccagataacaggcacactacgacctgaacaacttgcagaatcattatatggaaaccagcaatactactggatcctgttgatgcttaactctgtttatgaccctttctatggttggatctccgatcaggaagccgcgtatcagtgcgctatacagcgttattctgaggttggcggtgaacaggttctgtatcatgtagatgaaaacaacaacaagtattataaccttgtcgaagaccccaataaccctggtcattggtatgacaaaggtgacaaaccaatgctgtatttacagtatcaaggtgtattagctcctgtagatatttatgaagatgcagtgttgcaaaatgaagcaaaacgaacaataaaaatcattagtccgtctgacatccaggcgtttctgaatgattttattaaagaaatggaaaaggctaactcatgaaattaggcggaaatttacactcccctttctttgatggggtggttgaaaacgttgatgatccgcgcgggttgggccgtgttcaagtccgtgtatttggacaacacccagcccaaaaacaaaaatccgatgcaatcggtgttcctgttgaagatttaccctggatgatgcctattcaggatattagaagcgctgcgatctctggtgtgggcttctctccaactggtatcactcgcggatcctttgttgttggttattggcgtgacaaatggcaccaagatggtatgataattggtactgtcgctggtgaatatgtcgaacaaccagacacacagaaaggtttttgcgatcctatgggtgaataccctcgctatgttggtaacgatgttaactcccttgctttaggtggtttgaaaggcaaaggatcatcaagtgtcatcattcgtgattcaaacacaagcatagcagtaaacccagacgatcgcccactggatgagataccagaagataaccgccctgatacgggtggatttacgatcgaaaagatgctcaagcaggatgaggggatccgtacacgatggtatacagacagtgaaggatatccgacaatcgggatcgggcatttgcttatccgcgaaaagactcgcgacactgcaaaaattaacgctgcgatcagtaaagcggtaggtcgagaagtaacaaacggaacaatcacggcagaagaggtatcaaccttatttgctcaagatttagccaaagtaagatctgatattcagagaaccgctaacgtccgtgaagtgtatgtgaacctcaaccgtcctcgtcaaatggcgatcgaaaacatgtcgtttcaaatgggcgtcggtggtgttgctaaattcaccaataccctgaaagcgatgaaaaatgaagattggcaagcggcttataatggtcttcgaaattcactgtgggctagtcaaactccaggccgttcttctcgcgtgtctaaaatcgtcctcacgggcaaccttgaatcatatggggtacaagtaccagatccggaagggcgctctctgagtgctgcttacgctgcgtataacggtgctacattgttggctgctagtccggaagatccgtttactcctggtgatacccgtgtgatgtttgaagaaccagcatcatcttataatgcggaatatccgtataacatggtgtttgaatcgagatccggacacattcaggaattcgatgataccccaggatacgaacgatataaccgtgttcacccagcagggagttacgaagaaattcgcccggatggaacccgcgttgttaaaatcgtaggggatgactatcagatcgtgatgcagggccggaaactcaacgttaaaggcaacttgcaggtagttattgaaggtgatgcgttcatttacaacatgggtaacgttcaacaaacggttgatggtaacgtaactgagtttgttcgtggcaacgttcaacaaacggttgaaggtgagtacgttggcctgattaaaggcaatgctgaactaactgtaaacaaagatgcaacagttaacgttgatcagaatcttaccgcaaatgtgaaacagaatgcaaccgtggctgtaacagaagacgcaacggtcactgcaaaaaatgcgaaaattgagattgaagaaacgatggatattggtgctaaagatatcaatatcaaagcaacgaataacacgtttattgattctggcgcattaacaaaaatcactggcggcaccgtccaagtggggtaattaaatgattatggattatgaatcaataattgatggaattatgcaaaattatcaacatccttgtgatgctgagatccccgctggctattatcggcgggttatctggcaagggcatacagaaaattatccggctgttggggttgagtgggataccgagataatcaaaatcggtactcatctttatactcaagaaccgttcggacatagaagcacggatctacctgttgtcaattcaccgggaacagatccaaataccggacaaccaacagggatccttgttccgaagattggctattatttcaacactcaagcagagattgatgcttacattacatccatcggtgcaactaaaatcaatggtggtaatgattggtacggcgcggatctgtcaaaatcaaacctatacaaaaaccctggcgaactggctatgtataaggttgaaaacagtggcgggtatctttccggaacaaaccctgtatgtgatgctcgcatacgtcaggcgtataatcaggacactggcgcattcaccaatattgattattattggaatggtaatcgtatagcatatatgaagcatgacgaaacaggggcgcaccagtgcaaatatacgggtatgcaggttaacaccaacgcagatacaagcattcctcctgatcctcctgcaatgccttccacttatggagcattaccgagtgaattaagccgtgctgatatttcgtgcattccggcaactgttggtttcgcatatacaaatatcagtgatgctatgttacaggcatggaacgaaacccgtaatacgttcaagctacagtttaacatgttaacgggtgctgtacagaatggattcgggatcgcgacgatgtttgatggtttatccgtatcgatggaagaagtaatggcgggggcgctcgcattgtcacagcaagcatggcaaactgctatgaaagttttcagacaagtgattagcgctgcatttaacattatcggtggtgcatggggattgattaatcagttcttgcctcaagtaaccatcttaggtgttgcgatcaacatttacgatctggtgtttggtgataattctgttcagactttgaaagatgcgtttaatgcaatcatcaaatccggacaacaaacatatgaaaccgtcataaacgcaatatacggggccataggaagcgcatacaattactctgtggaatatgtcaaagctggcgctcgcgaccttgtggatgcgtgtagcgcgttatttgattggtgtttaacgatgttccaaaacggttgtgttgcattaatcgacttatacggtcggatcatgcaaacatgggctatccctccggaagtcccaaacccgttatggtctgcggtgctggctatccgtaacatcatgatgcaaatcaaaccacttgatataattctgggcggtaacttccctggattcactgcaatggatttgtatcaacaagcacaggaaaaagtcaaggcttttgttgatgagtcatacgaacagatccgagggctttatgaacaggggcaggaactttacaaaacgttaaaaaatcagattttcgaacgtgatacaattcagagaaaattcaaccagtacttaaactggatgtggggcgctgtaacagacgaagcaacagcggcttatcaatctgcattggatgctgcaaacgctgctgtagctgcaacacaggccgcgtatgacgctatacaggaacagattggatctctacaagatgcaatgaaagatacatacagcatggcgatggaagaattaaagaaattgcctttgatgagtacaataaacgagtttttaggcttctgtggtgtcgcatttgacgatcttctcaagtcatatgaaaatgcgattactggtgctcagtctctgtacaaaaatttcattgatagttctcgctcgtttaaagatcactgcaaagtaatctataaccaaatttgtacgttggcgttgagtaaagtcacacaatatgtgaataaattgctgtctctcataggattagcaatcaactttggttcgattagtgtatgtgttccagtactgaaatactaaatagtcgaatgatcaagaggaatttataataatggctactgctaagactaagactgtcaaaaaacagattaaccaaatccccgatatttttatcgggggtactttcgaagaaattaaaacagatctgattgattggctgggtggacaagaagagtttaaggattacgatttttccggctcgcgaatgaacgtactgatcgaccttctgtcgtatgctactctttatattcagcagatgggtaacacggctctatttgaatcgtttattcgcacggctgcattgcgtagttctgttgtacagtctgctcaagatctgggatatatgccagattctcgcacggctgcaagcacagcagtaatgattacggctgctaacccactgaccccaacatcgatccgtatcccgcgcggtacaaaattcatcggtactgtaaagaatacagacagttattcttttgttgtatcagatgacgttgttatcgttcgtgatagtaataacaactatacatcaatgctgaacctggtgcaaggccgtttagttcgtactgaactaatttatgacggttcgagtatcctgatccgagatccaaacattgaccgtagtcaggtacgtttaactgtaaacggcgcacaatgggaagactggacaaacgaaagcattgtaaacgcaacaggcgcaagcacgatttactacatgcgtgaaactgttgatggacataccgaagtttatttcggtgaaggtgaagcaagtcaacaagtggcgggtggtgcattaaccgctgaatatatcgggggcttgaaacctgctaatggatcgactatcgttattgaatacctgtcaaccgatggggaagcggctaacggtgcaaaagattttatctatgtcgatacattaaccaatattagcatcactaacatcgaagaaaacccgactaaatcccctgattatgtcggtgctgatggtggtggtgatccagaagatatcgagcgtattcgagaactggcccctgttatgcgtgaaacacaacgccgttgtgtaactgcatcggattatgaatctttcctgtctcacagatttggttctatcatccaggcggtacagtgctttactgataacgaaaaacctggttatgctttcatttctgttaaaccaaagtcaggtttgcgcctaacatcggtacagaaagaagatatgcaaacgtatctttcgaaatataacctcgcgacgatcaccccatcgattatggatcctaactatctgtatattgtgcaatctgtcaaagtaacgtatgatatcagtaagttgacggaatcagaggaatggttacgcggtcaggttatttcgtcgatcgactcttactatactgacaacgttgaaattttcaacaaatcgttcagtgtatctaagatgttgacttatgtcgatcagtctgatacttctattatcggttcggaagcagatattaaattgctccgtgaaattgacaactattacagtgctcctatgtctgggatccatttcttgaaccaggtggaatcgaaatcaatcatttccagtacgttcaagttcaccaacgaagaagacgaaagttatgttgttcgttatgcttctacggaaatggatcaggatggtaacgcaaaaattgtaataggcccgttcaaggatggggatatttcgatcgctgcttatacaggtgatgactttgaaaaattaacagatgcaggaacccgtaataaatattacgaagtcggatcggtgtctcattataccgatttcattagctttgatctgggcgttctgaacgtatccgccgatagtttcagtgctgcttatatcgagctaaccgcaaagcctctcgaagaaaccatttttactcgcgatggatcgttgatcgtgtttgaaaatgacctacgtcctcaatacaccacattgactatgaatcctatcagtcaataatcgttaacccctgtcttcggataggggtttttctttttataaatacgtgatatacataaccgcaaatttggagaaatataatgattaaagcgccttcgattacgagtttgcgcgttgataagctggctgctaacttcgtttaccttaaatgggatgatgttggcatggatttctattatgtggttgaattggcccgtagccgtgatatggacggaactattattccagacgaagagttaatctggacgcagttgggttatagctacgaaaacgaatggtttagcgatcaggttgccccaaatacacgttataaattccgtattcaaacaactcatgaagggtttgaaccttctgattgggtgatcagcgatgaattatggacgtttgatgagaacgcctacgcatatacaaccatgcgtgaattcacccctgctgattcgtttatcaatgaaaaattcgccaaaaacaatcgtgattacgtcgattttaacgatgatgttattatggcttctctgatggttgaggattttgtatactctcccctgtattctgatgtaagccagatcagcgataagatcctgaaacaagaaagctaccatgaaattcaagatcacatcgaacacgtttgtaatgatatagatcgcacgttcctggtatactcaaacggattgctttacctgtttgaacgttttcagaatatggctaaagtgtcaaatgacaaaggccaaacgtggtattactacaaagcattaaacgatcgtgtaggcaatccggtttcccgtaccgttgcttatcagagcgctaacactacgtatgtgttaggatacgatcgcatattttacgggcgcacttcaacagatattcgttggtcttctgatgaagttcgtttttcttctgatgatgtaacgtttgcgaagctggggaaccagtcagggttagattttgatgttgattcatacaacacatatgcgcgtctaccgggaggagtgtcgaagtatgccgaagctatagcttgttctaatgaatggctctacgtggctgctaagaacgttatgcgccgtattgcgttacgtaacacaccaattgatactgatcctggttcgccgacctttggtgaacgtatttttgatgaagtttcatataccatcgtaccaggaaatgataaaattgttgttaaaaaaatggacgtgctgaatgaccgtctatacgttctggtaactggtgaagttaaaacggcgatgatggatccgactgtcaaggctaacgtgatcccatcaaacgatgctggcgtttatctgtgggatgagaatgcaaagacgtttacccgtgtttatggtaaaaccgaagatgaacgtttttatatcactcatgaatataccaatatgtcaaccaatggcgatgaagtttacatttctgttggtaactacaaatatccaggcactttgccagatctggatctggttgaaaagtatccggaagatgtgcattcagcggtgaaatacgatcttgttcctggttatactgcgagcatttcgattaactttgctacagttcgtgcaaatcagaacgatcctacagtatggaactttgggccgcaagagtactacaatgaagcaaactttagctggcatttccgcgataaggttagcacatggatcaccaatgataaccgtcctctggtggtttatccggaaaccctgtatactctggttactgatagcgcgtctcctgcgtcaacgattcgtgtaaaccatgaagtttgggacaaaggaacagttactatctacttgaataatatcaagtttactggttttacgaagtacacaaacggtgttctgttgtatcgctcaggtggtaggataattggattctatgaactgtcataccgcgcaagggatgaactcactattttctggaaacccgataacactttaatggtggcaagtctggttaatcaggaacgcgaaaacccatatacgccggatattgaacctggattaatcgaccctgatctgagtcacatgatcactcgttttgctccgcaaagctatctggacaaccaacagttcgagaaatttggtgaatactatctgcaatacatttcgttgggaagcaacagttactataacaaattgctgaacctcatccggaacaagtatccgagagagaaaaacaacgtcgaatatttgtggtctgaaattaaccgccgtaacatttacctggataaaaccaaacgtgaggcagtagttagatttttcgaatcacgtgcaagcgatttctattcaacaaaagggattgaggcaagttatacgttcctgtttaaattgctgtataacgaagatgtttccgttgagatcgaaagctccaacagtctcgaatatgatattttggttagttcaacaaatatcagccaggatatcgtaggccggacgatctatacaccaactggacgcgctaacgttacatacatcgaacgtgactatgaaaatggtcaattgcgttggtcaatgactctgcataatgctcaaggtaactttatcgaagggcaggttgtcaagtcagaaaaaaccaatttcaccggaatggtaattcgtggtgttcgcggtaaacaaatggctaacaactcgatcgactatatcaaccgtggacgatcttactatgtgatgaaaattcgttcaaatctaccgacttcccgttataaggatgacgtattgaggtttgttcatccggtaggattcggctttatgggtattacgatgttaacagtattcatcaactctggtttgtcaatgactcataacgagacaatcattgatattctgagaaactaccgcttcgatagtggttatcctaagttctggcctgatcgcattgcgagtatggacggtaacggaaaccaacaattcgacctggttactggtgaacctctgtacaccgtacacccgcgagcgggggaaccttttgatgtacctccggaatatgacattgaagaaaaaccgcttaacggtgttcttccttctgcgcgacggttcgatcaaagtccgttgttcgattgctcaggcgttaaatattcacagttccgtaatttggtggataaacgactgaaagatgatgcaggaaacccacgtgatccaaatcctccatcacagattaaggtaggaaattaaatggcacaacaaaacttgtatcggtcggtaattactgcaaaattccgaaccgaaaacttgatgaacttcaaagatatgatcggcgatgccgccgatctaaacacgatttacatgtctattggacgaactgaatcgtggtcggataacgaatccgaccctaacttcgccccgccatatccaaatgatagcaccgatggtgttagtgatatgtggacgcatatgatcggggctactaaagttcctggtgatatgatagatgcaattttaccacgtaaagactggggtgatactcgttatccaaacccgaaaatcttttactttaacgatattgttgttgtaaacaccgcaccttataaccgtactgatccgggtaaaggttggatggtttatcgtgtggttgatgttcctgatatcggttcttgctccatttcgagcattaccggaaaacttgaatgtatcaggatcggcggtatctggagtccgtctcatgaatctagtgaacctccacgcggagaagctaacgggatcgacatgggagacggttataaatgggaatacctctacacaatcccgccagatgtcgtgatcaaccgctgtacaaatgaacatatcgtagttcctttccctggcgaactggaagaggatccggtacgttggggttatgataacgtgattcaatggtatccaggacaatacgatctagtgtatcggttgaaggtgaattcaatgcgttttcgtgcatacatggattctcttttcttcccgcaatctacgcttcctggtaacaaagggttccgtcagataagtattattgtaaacccgttgattaaaaaggcaagcccgaccgagcctgaaaagaaagcaactggtgattactataatgctaacgcgcttgaacctgattccggacgtatgatttacatggaaaacagacaacctattattcgctcccttgatcagactgaggaagtgagtattgtattcgaattctaaggaaaaacaatggcttaccaaacagcaaaaaaactaattgatgtcggtgaaatcggcaacccatcaacaggcgacccgctttatgatggtggtgttaaactgaacgaaatgatcaccaacgtttataatgcgtttggtgatgtgcgtatgctgtctgcaaacgaaggtgtcggtaacatggtgatccatgctaccggatactatcagaaactaccacgcacttactattcaagcacaccgatcgaactgggttccctgcatgacatagatacttcaacaggttcgattaccgttgttcttccttctggtaaggttggcgaaggttgctacttcataaatagtacgggtagtgtctctgttgatcgtcctatcgcgtttcgtcctcaagttggggatactatcgcgggggttgcagaccagttgtatatcacgtcaccttacacctttgtaaaaatctggtgtaccaaaaaagaaggtgcggtaacaaaatgggattattctgtagaatctatgttcggttctaaaacgatgcctgttgacactacggcgcttgtactgaaagcaaacccgactgctattcctatgttcggatatagcgaatttagcggggctaaggtgcttgtatacgcagaaaacttagctggtacagttaccaaaatggcagaagttttaatgaccgtggatcgtgtacacaaaacgatttattcaacggaatacgctattttgaaaaacagtgaagatgaaatgtttacattaaactttactgtcggtgctggtgatgttgtatacgctaacgtgcaagcgatcaaagaagatcgaattaaattcacgattaaagcaatagatacgattaaatcagggatcgcgtcatgaaacaagaaattttaataggtcagattgtagacgatggtacaggcgattacctgcgtcgaggtggtcaaaagactaacagcaactttacagaattgtataacatgctgggggatggtgagatcccccatccagcaggtgcctggaaaacttttgcgggtacgacgctatcaccaaaatttggtgaatcatgggcgttgaataccagtgcaaacaaaatcaccgtaaacctcccgaaaggcggcgtaggcgattataacaaggttattcgtctgcgtgatgtgtggtcgcgttgggctaccaacaacgttagactgatccccgcaactggtgatactatcaaaggttccccaactcctaaagatctgtttaaagattttatggatgtggaactggtgtattgttctccgggccgttgggaatacgtcgaaaacaaacagattgacaaaatcacaacttcggatctggcaacagtagcaaaagaaacgtatattgctactcagggacaaactgacttccctaacgtattcggtgttggtaatgaatacaacctgcaatcgttcgaagtttactatcgcggtaacttgctgttcatcgatgagaaagacggattcaatgctgataactcagactatggatcgattggttctgctcctggtgaactggttgcacttgatggtaattcagtacgtcttaaaaacccgtgtaacgctggtgacacgcttcaatttgttacctatctagatgggttagcaacatggcgttcgagctatgaagcgtatgtgatgcgcatgtatcagactggtgatacttctctggaaaccgttcctggtgaacagtgggtaggtgatctggcaaccaaaaaagagtttacacctgctgaatttggtgttaaccctcgcgtgttgattaaccctaactcgtttgaactgcttctcaacggtaaacaactggttaaaggcggtgacgctgactatccggcgttttcctgtgaaggtgcggaaggtgttgatgaaagtacgtgtgttggtaactctggtgtatgggttccgtcaggacaggattatagtttagtattcactgattctgtagtgacttcaatcaagtttgctcaggaactggaatccggcgacgttgtaacgatccgttggtttaacaatgatattggtactctgatggattgggaaggaactggcggtattaaagaaaaagctgataaggtttatctcaataacgaagaagaagttatattgacgaaccgtatcgaatataccgattataataacccttctcagaaaacaatgcgtaatacaggggaaacctatcagggacgtattctggatattcaggctatgtttgatattatccacccgatcggaaccatctatgaaaacgcacacaacccggcaaaccctgctgattatatgggatttggtggttggaaacgttacgcagaaggttatttcctggctggctggacatcaaatgcagcggatcctgatttcgcattaaacaataatgatttagatagtggtggtcaaccgagtcatacggcaggtggtacaggcggtgatcgtggtacagaaatcaaaatcatcaacgttcctgaacttgtatcaaaagataaagttctgattgctgatgaaaatggtgctgtgatcattggtggttgtcagttagatcctgatgcttctggccctggatacactaaataccgtgaggatacattgaaagtgaatcatggtaacacattacctgataaaatcaaaactattccaccgtatatgactgcacatcgctggataagggttgcataatggcttacaacaatatttcaaaaacaagggagggcgctcgcgtcctctctaaagaagcagattacttacagtatgatacttatggtaagttgcctctgatcggcggtaaacgttcgatcggcgaaccaaacattgaccaaacaaaacgcggtgttctgtatggaaacgtacaatccgcaattgatgacctgtatacgcttatcgagcaaatcccgattaacggcgttgttaccatgactgaggatgcccctccaatcgctgtacagcaggttgagagcgtttcttttgatggtattgtacagaacatcgattcagaccaagaacaggctgtagttcacgtgtacggctttcctttcatctttgataatgggactaacgccgcaactgtttgtgaaacggcatacaacaaatttactgaattcgttgcagcggaaaaatatttcgcagaagttaaccgtaaaggtgttgatggtacgatcctagaatgtcgatttattgatagtgttccgcacccggcaacaaatatctcagaaaacggtattcgtcaaatcggaactatcgacgtagccgcaaaaagtggctatggttcatgggttaagttgggttctggtttcttacctgatgttactccgcaagtaaccgtgtattacttcaaacgaattgcataaggataacacatgagtaacaatacaatcaaccacgtaagtgataaatccatttacgtgacatttgacccaacaggtactgattggcctgataccataaccaacgtacaagatgcgttggaaaaaataggtagttgggcgcgtactgatactgggcttcctatcgcaacaacttctgttcgtggtattgctcagatcgcaaccgaagctgatattgacgctggcacggataacactaagattgttactccgaaactgttagcatatcgtatgcagaaccctaaagcatcacaaaccgtatggggttatacgaagtattcgactgatgcggaatctacaaccgtaactaacgatgcatcgtctattactccgcgatctctgaactatgtgttcaataaccgtaaaggtacagaatcggtttggggttcttctaaaattgctaccactgcacaggcggttgctggtacagataacactgtaactatgactccgcttaaagtcaagcaagcgatcgcgtccctggttcctgttcagtcaagcgcgaccgaaagctcgcaaggtttggtacaactggcaacagttgcacaggttcaggctggtacgatccgtgaagggtatgcaatttcaccttatacgtttattcgtttaactgcaactgaaagcaacctgggcgttattcgtatcgcatcacaggcagaagcaaacgcgggtactgatgacaccaaagcgattactgcgaaaaaattaatcaatacccgtgcaactggatctcagttcggtgttgtcaaattagcaacaactgttggttatgtggcaaacactgcactttcttcaaacgctgctgtattacctagtgatcgaaatgcggtaattaacggttctctttatgagaatagcgcaatatataacaacaaatatcagacgtggacagatcttgattggcatttcccagtaggtgctattgtcatgactggttttcagactgaccacggtagtttgtatatttgtgatggtcgctcactgaataaaaataactatccgttactttttgagcgtataggttatacatttggtggtggcggtgattggtttaaccttccagattgtcgaggcgttgcagtacgtggtcatgaccgtggacgcggattaaaccctaatcgtgggtatggtacatatgaaggcgatatgttgggctggcacgaacacccattacagcttatctaccagaacggcggtaatattccgaaatggcaagcagtttatgaacttaaaagcgccgagaaaaacgatcagagtgctcgcgtgtttgattcttccataactaaagctactggtgtgggcggagaagaaacccgcatgaaaaacatcgcattaaactacgtaattcgcgtattataacagaggttattaaatgatcatcgacaaattaaacccgttgccgaagatcccgtttgttgatggcgtcccagatgacgccacgactcaaacgaagattatttggatcaaaaacggtgaaactctggacggttcgccagataaagtgtcaaacactggtagtcttaaccgaactggtgtaaacatccagcagaacgcggttcagttagaacaaaataccatcacccataatgataaaatcaacgaagtaatcgatcaggttaacttgattactgaaaacattgatgctattggtgatgagagcgtaatcaaaaaagttaaccagttggatcaggatgttcaggcattaactttatctaacacccaaacacagaacaaggtagcacagttaaccctttctgtaaatgctcagaacgatgaaattggggaatacgatccagaaaaggatcctaaacaccgcacaattcgtaatgatatcatttacattaagaaagaagttggttcatatcctggatttaacgttgatggtgatgttgacccctcttctactggtactggccttaaataccgcgtactgagtaaccaacgtgctatttctatgcaggaaactcgcataaccaaactggaagatgattgggcgctttccgaagtaggacaactgacagaagaggtaaaagaacttcgtgctgaaatgggtgattctggtcttgccacaacccgatcaatctatgcgcgaattaagatccttgaggatggttctgttgtaatgcaaaatgaacttgatgcgattaatagttatataggacgcacgtcaggttcaaccagttccattaacgatcgtgtgaacagtctggaaaactccgttagttctctggctacacaaatcaacgatccggtaactggtatcactgcacaaattgcaaccatcaatggtcaaatcggtacggtttctgttcagggtagtatccgttatgatattgcggaaaacaaacgcagattgatggatatggaaatgattctgggtgaatccggtgatgaaggattgcagggacaagttgcgatcttaactggtgacattggcgaagattcagatcctaccagtatcaaaggccgtttgagtgttgttgaaggtgaattacgcaccaacactagcgcactctgggaactgcaaggcgttgtaggtaactcttctagtggcctcgttgcaactagccagcaggttaacaaagaaatctatggcgatggtgttagttccgatcctgttactcgcgctggtttgaaaacgacaacccgcaacctgttcactcaggtaggcgataacgcagaaggtaacgaaacaggcatttatgcactgattgccgaccttaataaacgtgttgaggatttagaagcgttgaacattgcacaggcacttgcagatcgcgtaactatcgaagatctgaatgctaaactggctctgtacatcaaagaagctgacgcagatctccgttatgagagcaaaaacccgcctctgtcattcggtactaacctaactggtgatactgaatacactactggcgatccattgtctctaagcgtaactatgaatggtggtgtttctccgctgtcttaccagtggacgaaaaacggtgtaaacgttggcacaaactccaacacatttaccatcgattcgctacagccttctgattccggaacttacaaagtaacggtaactgatgcaagccataaagtcatcgtttctgatgaactggcgatcactgtcgcttaacgattaacaaggggcttcggccccttttgaggatctttatgattacgaacaacccagcacaattaaaagatgaaattctgcgccgtttaggtgctccgatcgtcaaaatcgaagtgacaaccgatcaggtttatgactgtattcaacgagcattagacctatatgcagaatatcattacaatggatctaacaaagggtatatcattcttaccctggggccggacaacccgaaaaacattttcgatctgagtaaagaacacattttcgcaattactaaagtgttgcgtactaacatgggttcccttgtatcgatggatggtactgcggtttatccgtggtttactgatttcctgatgggccttactggtggttctctgggcggtggtggttgtgcatcacgtacctacggaatgaacgcatacggcgcggatatgggctattttacccagatgatgagctatcagcggtcaatgcaagatctcctgtctccgcttccggattactggtataacgacgacacaggacagtttgcagtatacggaaccgttaaagatggtgatattgttgttatcgaagcaatgatcagatcctttgttgatgtacccagtatggtcggtaacgtctctggatacgctacagcgggttctgatggcgaagataagccaactatagcagatatatacaataacccctacaaagctgtctcaggcggcgtgaaggctggtcaaggtacaagcgttcagagttcatcctctgcgtataacaaccgttgggtgaaagattacgcaactgctcttgttaaagaggtaaacggtcaggtgctggctaagtttcagggtatgcaattgcctggtggtgttgctccggatggaacccgactgattcaggaagctatgcaagaaaaagaaaacctccgtcaagaacttctgttactgtctgatgcacttccagtgttgatgatgtaaggaggaaaaatgcactatagattgtatcttgttgtttttgaaacttctactggattaaaaatttatggggggaagcgtcattccccttatgataatccacataatgacccatatacaggatcagggacatatataaagagagctattaaaaagtatagccattcttgtattaaatgcattcgatggtctaaagaatttcccaacagagaattactagcagaagcagaagaattattagttgatgagataatggattattattccagttgtgctaatctagtacggggaggaaaaggcggagtttctttttatgatccatcaaaaaacccaaatataggttcaaaacgaagtaaagaatctagagataaaatgtctatgattgccaaaaatagaaaatatagcgaaattggccttaaaaatagacaagaagccacccgtataatgacaagaaatagaaaacaccatgatgtttctggtgataaaaatcccgctgcaagaaaagttatcgttgatggcgttgaatacccaacattgaaagaatgcggagaccactacggcataacaaaaaattctgtatttcacagaataaactctaagaaatgggagggatggaactatgcgtgattgggatgaaaacttatttgcacaactggaatctggggaaggtgtagacaataacctaaaaacagaagttactaataagtatgttaactggtacaagtataaccctactcaacagttgcatgattcactaacagccgaagcaattcaaatgaaatctccggatatgtattacgtccgtcgagaatttgttaatattgataaaattttgggcgaagaccgtgaatcgaagtttacaaaatcgtggaaaattgcagcatacatcgattcgtatgcaaactacgaaggacagagagacttttacagcaaatttggtatgatgtcaaacgatgaaatgacacttgtgatcaatcctcgtttatttgcacatcaaactgatggcgggatccctgttctgggggatttgatttatttccctatggataacagcctgtttgaaattacatggattgagtttgacccgttcttccagttcggcgatcgtcctcaacgtaaaatcaacctcgttaaatttatctatactggtgaagaattggatcctaaactgcaacgaaatgaagggattaatcttgctcccgatgctgatctggatctcgaacctattcgaaatcttgatggattggctgataccaatattgaacagtacgaagaagatcaagcctttgaagatgaaggcgatgaattcattgaatcgtttgatgttgttaacgggcgcggatcaccgttcgcacagttcccataaatataaccaggggaaaccctatacatgtaagggtataggagaaatcttatacccgctttaacccatacaggaaaaagaaaatgtttggctactggtataatagttcgctgcgaaattatattgtcttgatgggttgtcttttcaatcacgtgcaagttaaacgcattcgcggcgaacaagaaaaatttatcaaggttccgattacctacgcatcaaaagaaaaattcctggcatccatgaacaagctgaactatgcatacagtcaggaaaatgttgctaaaacggaaacaattttaccacgtatgaatctatccctcgttgatttgcagtataacgcaattcgtaaaacggggatcgcggtaaaccaaaaaatgacgcagttacgcgcacctggaaaaacagtaactcagtttaaccctgctccgtatcgtctcatgttcgaactgggagtgtatacccgttacgaagatgatgtgtttcagattatcgaacaaatactgccatacttccagccgcatttcaactgtcgtattacagaattacataaaaacgacattaaaatagaccgagatattaaaatatctctgcaatctgtttcccctgatacatcatttgaaggtgatgcaacgacacggcgacacattgaatggtctttaatgtttgaattacagggctacctatatccgcctgttaacgagattaaaggcgagatcagaacagtatacacggatttcttttccaatatgaacccgttggacaaagataattttgaatccgttgatgctcaggtggatccggttgatatgcctatacaggattacacgggagaagaatacattcaaacgtatgctaatgatatcccaattcctagcggtgatcaacctcctaaaccgaggggccaataatggaagaatttagcgtaaaacaactacttgatcttgaaaatctccctggtgctgaaactggggaagaaatggttgtatatgaaaaactcgaactcgttgatgtcgagtcacacccagcagatcgaaaacctgatttagaggaagactatgcacttgcgcgtaaaaccgcgcattacatgaatcagatgatcatggatatggcacaaattgccttgcataacgctaaaaactctgaatctccgagacacgttgaagtttttacaaccctgatgaatcagttaaacaattctaaccagggattgatgaaaattcataaagaaatgcgagaaattaccgaagaaacaacaaaaccaggatctgaaaaaggtaatggcggcggtaatgaaatgaacatagagaatgcaactgtatttgttggttcccctacggaattaatgcagaaatatggtagtgcatacgaaccaaaagaaggcttcattaatggtgaagcggtagaggtaaaccctgatggaaatggaaccgacgatcgatccgagtaaggaatcagatcacccaatcggattaatgcatcccgattatctgaaaaagaaaattgatgaatttgggatggagtggacgcaaagcgaacatgataaaaaatggtatccgacaaagtttagtgattacctaaaaattaacggtatccataaagttgatattcaagcaaaagacagttcaaactttgcgacttataaaaacaaaggaaacaagaaaactcgatataacggaaacccaaacctgaaacgcgcgtacatccaaacgaaatggacgcaacagatgttgatggagtgggttaagtgtcgtgacgatattgtttattttgctgaaacatattgcgcgatcacccatattgactatggtacaattaaggttcagttgcgtgactatcagcgcgaaatgctgatcgaaatgcataaaaaccgtatggttgcctgtaacctgtctcgccagttgggtaaaacaaccgttgttgctatcttccttgcacactttgtgtgtttcaacgaggataaatatgttggcgttttggctcataaagcctctatgtctgcggaagttctggatcgtacaaaacaggcgattgaacttctccccgatttcttgcaacctggtatcgttgaatggaacaaaggttctattgaacttgataacaaatgtaaaattggtgcgtttgcatcttctcccgatgcggtgcgtggtaactccttcgcaatgatctacattgacgaatgtgcgtttattccaaactttattgatgcgtggttagcgattcagccagtaatttcttctggtcgtaaatcgaaaatccttatcacaacgacacctaacgggcttaaccacttctatgatatctggaacgctgctatagaagggaaatccggcttcgtaccatacacggcgatctggacatcggttaaagagcgtttgtatacagacggtgatgatggcgtatttgatgacggctattcatggtcttcgaagatgatcgccagttcaagtaaagaagcatttttacaggaacattgtgctgaattcatgggaaccaacggaaccctgatcgctggctggaaattgtcaaaactctcatgggttgatactgatgaaacggaaactaatttttatcagtataaagctcctgtagagggacataaatatattgcggtactcgacccagccgaagggcgcggtcaagactatcacgcgatgcatattatagatattacatctatgccgtttgaacaggttgctgtataccattcaaacaaaacatcgcaccttattttgcctgatgtcctgttacgttatcttatgatgtacaacgaagcatgggtttatatcgagctaaatagcacaggtcactcagtggctaaatctttgttttctgagttggattacgataacgttatttgtgatagctataatgatttggggatgaaacagagtaaacgatcgaaagcgattggctgctccaccctaaaagacttgatagagaaagataaactcatcataaataacaaaaagacaatacttgaatttcgtactttctcagaaaaaggtgtttcgtgggctgcggaagaaggtttccatgacgatctcgttatggcgctggtttgctttgcatggctaacaacacaaatgaaattcgcagaattttgcgagaaagacgatttgcggttggcaaatgaggtattcgcacgtgagcgcgaactgctttatgaagatatgttatgtcctgttatcgtaacgagtggcgacgaaacaatatctgtcggccaacacggtatttcgtttatataaatttagaggaaacttaataatggctttaatctctccaggcattgaaactaaagaaacatcggtacaatctaccgttgttcgaaattcaactggtcgtgctgctattgttggtaaattttcatgggggccagcttaccagatccgtcagatttctaacgaagtcgaactggtaaattattttggctccccagacaatgacaccgctgattatttcatgaacgctgtaaactttttacagttcggtcaggatctgcgtgttgttcgtgtcgtcgataaagaagccgcaaaaaacgcaaccgcgatctataatcagatcaaaaccacgatcaccgctgctggttctaactatgcagtagacgatcaaatcaaagttaaacacaataacgttgttattgaagaagatggcgttgttaccagtgttgatgatcagggtaaaatcctgtctgtgttcattccgagcactaagatcatcgcacacgctaaacaggttggtgtgtatccggatctgtctagtggctggactacagaaatcatttccagttcttctggtgtttctgctacgattacaatcgacggcgtagaagttgatccgggtattactctgctcaaccttgacaccgcaaaagaaactattcaggcaactgatttccaggaactttgcaccaaataccagctaccgtctgttattgcaatttatcctggcgaaatgggtagcaccgtaacggttgaaattctgtctaaagctgcatacgattcttcggctgtcattaagtcttatccttctggtaagtctggtaaaaacagcggtcgtagttcgatgaactttggccctcagaatgataaccaatacgcgtttatcgttcgccgtggtggtattatccaagaaacgtttatcgtgtcaaccgctaaaggtgataaagatatctacggttcaacgatctacatggatgatttctttgcaaacggtggttctcagtatctgtatggtacgtccctaaactggcctgtcggattctccggcgttctggaactgggcggcggtacttctgcaaacgccactgtaggcgctgatgaactcatggctggttgggatatgttcgcagatcgtgaatctctgcatgttcctctgctgattgcgggtgcttgtgctggcgaaactgccgaaatttcgtctactgtacagaaacacgctgtgtctatcggtgaaacccgttcagattgcgtcgtattcgtttctccgccgcgttctgctctggttaatatcccactggctcaggccgttgataacctcgtagaatggcgtacaggctacaaaatcggtaatactaccccagttgataacaacatgaacgtaagttcaagttatgcgttcatcgacggtaactataagttccagtatgataaatacaacgatgttaaccgttggatcccgctcgcgggtgatatggctggcctctgtgtttataccgatcaggtatcgcaaccgtggatgtctccggctggctacaaccgtggtcaactgcgtaactgcatcaaactggctatcgaaccgactaacgcgcatcgcgattctatgtaccaggtacagattaacgcggttactggtttctctggtggtgctggatacattctgtacggtgataaaaccgcaacgactgttccaagcccgtttgaccgtatcaacgttcgtcgcttgttcaacatgatcaagaaagacatcggcgataacgcgaaatataaactgttcgagaataacgatgatttcactcgttcttccttccgtatggatgcaggacagtatatgtctaacgttcgcgccctgggcggtgtatacgattaccgtgtggtttgtgacactacgaacaacacgccggatgttattgatcgcaatgagtttgttgcatcaatctacgtcaaaccagcacgttctatcaactacatcacactgaacttcgtagcaacctcaactggtgcggatttcgatgagttgattggatcaacgtcagtataacatgtaaggggctgaaaagcccctataaatacacatagaggttagaaaatgcttactgatattgtacgcgcctttgaatccggtgatttcgcacgtccgaacctgttcgaagtagagatcccgtatctgggcaaaaactttaaattaaaatgtaaagccgctactatgccagcgtctaccgttgaaaaagttccggtaggttacatgaaccgcaaaattaacgttgctggtgaccgtacctatgatgactggacaatcacggtatataacgacgatgcacacacaacccgtgatgcaatcgtagcatggtcaaacatgctgcatggtatgggtgaagacattacaggggatatccctgcaaactacaaaaaaaccgctacggttaaacagaaaaaccgtaacgacgaagtaaccgccgaacataccatttatggcctgttcccgaccaacgttggtgaggttactttagactgggatagcaacaacgaagtgagcactttcgagtgtactttcgcgctagactggtgggtttaaacgctataaatacaggggtagcaataccccttatcattatttttcggagttgtaaatgaacttttttggattagacaatgtgttagggtttttcaaaaatttcgccaaacaggatgaaatggaatttgaagcccaattaaaagatgatacaggttcgattgcgcctccgaaaaataacgatggggcgcacgaaattgaaacggacttgtcaaatcagcgttattcttctgtgttccaacagttctattccggacaggatccgcgaattcagaacaaaacacagctaataaatacataccgtggtatcatgacatatccggaagtggaaaacgctgtttctgaaatcattaacgaagcgattgttaatgaacaaggaaaagatattgttacgatggatctttctaaaactacttttagtaagaatatccaagataagatcatggacgaacttgataccgtaatgaatattcacgatttcgataaccgaggctctcgtttattccgtgattggtatgttgattcgcgtatctatttccataaaatcatgcataaaaatgaatctgatggtatcaaagaattacgccagttagatcctcgttgcatggaactgatcagagaatcagttacagaaaccctacccggtggggttaaaattttccgtggctatcgggaatacttcgtatacaccgcaccaaaaaacggttatagctacaacggacagatttatagtcacaacgacaaggtaaaaattcctcgctctgcgattgtttacgctcatagcggccttgaagattgcgacaacaacattataggctacctgcaccgcgcggtcaagccagctaaccagttacgtttgctggaagatgctatggtgatttaccgtattacccgtgcgccggaacgtcgtgtgttctatatcgacgtaggtcagatgggtggccctaaagctacacagtatgtaaataacattgcgcagggcttaaaaaaccgtgttgtatatgacgcgagcactggtaaagttaagaatcagcaaaataacctgtcaatgacagaggactattggctgatgcgtcgtgatggtaaagcagttaccgaagtttcaacgcttcctggtggcactgccttctctgatatcgacgatgttaaatggtttaaccgtaagctgtatgaagcgttacgtattccgttaagccgtatgcctcgcgatgatggcggtatccagttgggtaacgatggcggtattacccgcgacgaattgaactttagcaaatttattcgcgaattgcaaattcaattcaaccctgttcttgcggatccgttaaaaactaacttgatcgcgaagaaaatcattacagaagatgaatgggatgaaaacgtaagtaagattgcttttgtatatcagcaagattcttactattccgaaatcaaagatattgagattttggaacgccgtttaaatctgatgggccaacttgaaggggtggtcggcaaatatgtatcccataaatacgtaatgaaagaagttctccggatgtctgatgaggaaattcaaagcgaagccaaacagatagaagaagaatcaaaagaagaacgttttaaaaatccagaagcggaagaggaaaacttttgatgaaagaatttatcgaagcaatcaaaagcggtaatctggtggaagctaaaaaaactttttactccatcatggaagaccgcaaagaagcgcttcgtcacgaattgcgcgttgaacttgccgaagctgtacgcatcgaaggcgaagaagacaaagaaaaagacgacgaaggcgctgataaagatgacgaaaacggcgataaaaagccagccgaggatgataaatccgaaaaagatgatgagtgaggtgtgtaatgcaacttgacatcgaaatcaccgccgaagatctccaggaacatttagacgaagcgaaagcccgtgtagatattctgggtatcgatgaaggcacggttaaaatcatcgaaaatttggcggtcaccgaaccaaatttagcccttgctatgatggcggttgttgaaggtttaacacttgatgaggtaattgtcaagcatgttgattcccgtggcaacgtagaacgcctcaaagacaggaaaacccgtgagcgtaatgcgtatcagactaccggattaaccaaatcccaacgtcgtcagatcgcgcgtcgtgctctcaaaacaaaacgtgctaacccgtcaattgctactcgcgcacaacgtaagcgcaagaaagcattgcgtaaacgtgctgcactggggctataaatatgaatgaatcccaaatcaacgaaaacggcgacatgcttttaatcgaagaatggggtttaccttgcggtgacgtttcagaatctattttagaatctgttggggaatcaaaagacggtaaattgcggatcgaaggtattttccttcaagccgaaaaggttaaccgtaaccgtcgtttgtatcctaaaaacgtacttgaagaagcagttaacgattatattagaactcaagttaacacccgtcaagcattaggtgaaatgaatcaccctccgcgtccgaatgtggatccgcgaaatgcttgcatcctgattgaaaaattatggtggaagggtaacgatgtttggggccgcgctgttgttgttgaaggcgacggtggtgatggtgacaaactggcggcgttgattcgtgctggttgggttcctggtgtttcttcccgtggattaggtaagctctccgattccggcaaaggctacggcgttgtacaaaagggctttaaattagctgtaggcgttgatgtcgtctgggggccaagcgcacctgatgcatatgttaagcctatagtggaaaatcagcaaagcaaaccgcttgttgagaataatagtgctgatgacgcatttcgggcattgtccgagcgtttgaaaggtctataaatacattaaacaaaacaacaggaaaatcaaaaatgcttaaagaacaactgctggcggaagcccagaacctggatactccggtcgagttagacagcattttcgaatcagttgaactttctgatgacgtgaaagcgacattcaccactgtattcgaacaagctgtaaaagctggcgctgcaaaactcgctgaatcccacattacccagatcgctgaacgttccgacgaactggtcgaagctcaggtaactgaacgtgccgctgaaatcgaaactaagctgtacgaagatgctgataaatattttgcgcacatttccgaagaatggctgaaagaaaacaaagaagccgtttcccgtgacatcaaagccgacctgtttgaatccctgatcatgggcctcaaagaagttctggttgaacataacgttgtcattccggaagaacaggttgatgtagtcgccgaactggaagacgaactgactgagaatcagcaggaagttaaaaccctgtttgaagcgaatcaggaactgaccaaagaaatttcagaaatgaaacgcaatgcagtagtttcagagaaaactaaaggtttgaccgaatctcaggtcgaaaaagtagaatctctgattgaagggctggaatattccgcaaccttcgaaaataaactcagcgcaattgttgaaatggtagcaaccaaagctgaaaaacccgttgacgagtctgtaaatactccgcaaacgaaagatgactttgttccggtagttgaaagtgttccggcagagaaatccaagatcaataaatatgtacaagcggcaaaagccctttcttaatttcaaaaggtaagaaacaatgtctaagaaaaacgaattgatggaaaaatggaacgatcttctggagtctcaggaaggcttaccggatatcgctaccaaatccaaaaaacaactgattgctgccattatggaagcacaggaaaaagacgcagaagttgatccggtttaccgcgacgagaaaatcgttgaatccttcggtggtttcctggcggaagctgaaattgctggtgaccacggttacgacgcaaccaaaatcgcttctggtaactcaagcggtgctatcaccaacatcggccctgctgtaatcggtatggttcgccgtgcgattcctaacctgatcgcgttcgatatctgcggtgttcagccgatgactggccctactggtcaggtgttcgctctccgcgcagtgtacggtaaagatccgctggcttccggtgctaaagaagcattccatccgatgttctctccggatagcatgtactccggtcagggcgcggctccgagcaacggctttaccgaactggcttccggtactgcgatcgctgacggcgctatcgtgttccacgatttcgttgaaactggtcgtgtgttcctccagaacgtttctggctctccggttactgtaactggttctaccgccgatgctctggatgctgctgttatcgccgaacaggaaaaaggtactctggctgaaatttcttacggtatggctaccagtgtagcagaactgcaagaacagttcaacggttctactggcaacccgtggaacgaaatgggcttccgtatcgataagcaggttatcgaagcacgtagccgccaactgaaagcacagtactctgtagaactggctcaggatctccgcgctgttcacggtatggacgctgacgccgaactgtctgctattctggcaaccgaaatcatgctggaaatcaaccgcgaaatcgttgacatgatcaactataccgcacaggttggtaaaactggtttcactcagaccgttggctctaaagctggtgcgtttgacttccaggatccgattgatgttcgtggcgctcgttgggctggtgaaagctacaaagctctgctgattcagatcgacaaagaagcaaacgaaatcgcacgtcaaactggtcgtggtgctggtaacttcatcatcgcttcccgtaacgtggtttccgctctggctcgtatcgatagcggtatcactccggcaggtcaaggtctccagaagactctgaacgttgacaccactaaagcagtattcgctggtgttctgggtggcgtgtataaagtatacatcgaccagtatgcacgtggtgattacttcaccgtgggttacaaaggcgataacgaaatggatgctggtatctactacgctccgtatgttgcgctgaccccgctgcgtggttctgatccgaagaacttccagccagtaatgggcttcaaaactcgttacggtgtaggtatcaacccgtttgcgaactctcgctctcaggctccgtccgaccgtatcacttctggtatgattaccaaagaaatgttcggtaaaaacgcatacttccgcaaggtttatgtgaaaggcatttgatcctaagttattgaaaaataacgatattaaagggaaccttcgggttccctttttcatttctataaatagtgaaaacgattgaggctatattatgaaacatattatctacaaaataacaaatttggtcaataataaaatttacgttggtgctcattcaacagaagacatcaatgattcatacatgggttcagggattgcggttaaaaaagcacaaaagaaatatggaatgaataactttgtaaaagaaatattacatgttttcgatacccgtgaagaaatgtatgaaaaagaaagagagatcgtcaatctcgaattcataaatcgtccagatacgtataatgctggcataggtggtaaaggtgctcctatgtcattgattggttggtctgacgaacaaaggaaaaagatttctgaaaatactgcaaaggctatgcgaacaccagaactaagggagaagatgagacaatcccgtttaggtaaaccacagtccgaagaatccaacaggaagcgctcagagacgttaaaagctaaatacatgaacggacgtacagacagagagtataaacctctcacagaggcgcacaaggccaaattaggccgttctgtatcgatagatggagttgtatactcatccggatcggaggcggcaaaatcccttagtatgtcccactctggtttaaaatatcggattaatagcgacaaataccctacctggaaatttgttgcataaataccattatacactttacgcaggaacataaaatgagtgaaaaattttacacaattaacaagctggtgcgtcagtcacagctaccgcctggcctgtctaaaaaggttcttgatgaggcaaccggaacagaaacaattaacgtagctaatacccgtccggatctggtatctcttacccgtgcggtaaacaacctgatctacggtgaacttgtagcgattcaggaaactaatttacctaccgcaactctgttcggtgtgcgttatcgtaaccctaaaggcgatatgacgttttccagcgctgctacatattccggtaagtatgcaagccgcgataatatttcaaatggtgcggttggtactgcctacaccaaaggccaagttttcaaacacccgacaagtgatgttgtatacgaagtaactgatagcgtaactctcgcaggtgctgatattgatgaagcgattatggtcgcattattcagcaataaattacgcctggcaagcgaagccgcgccaacaagtcaatatgaaaccagcgaagatattagtacaacttctttcgaaatggatcgttggaatatcaacgttcgttcccgcaaattcaaaactgaaatgaccgtggaacttatgcaggatctggaagcaaaccaattcaacgcagaaaatgtgattgaagatgttttgggtactgttgccagtgaagaagtaaacaaagatatcattcagactctgatcaacgtatcaaatcgttacaacgttgatggtgtggtcacaaatggcattttcgatgctacaaccgcatacactgcaaaggatgctccggctttaggtcgtttcctgtatcaattagtgtgtgaaatggggcaggaaatgaatagaacgacttcatttgaagctacctatgtcctggcctcttctcgcgttgtaggcgttctggctgcgtctggttggatgcatgaaactgatgaaacccacccgttagcaacaggtcgacttaaaaacggttattatgtctatactgacaccaatacaccgtttgattacctgctgactggttgcaagtacgatctgggtgaaatggatcatgttggctctctgttctatacgccatacacagaagctgatcaggcaggttcgatcaagatttctgttgatcctcaatccttacagcctaaagttgctattctgatgcgctacggtttatcggttaacccgtataccactgctgctaatgaaagacttgtgaaaggtgatgactgggtaaacctctcaggcaaatctaaaatgagtcagattgttggtatcaaacttcctaaactgggttgatagtataacccaacggggataatattcaataggtggagtagggaaacttactccatcttttaataattattataattaatattaaattagatcttgaatttataaatgatttatgataaaatttattaattataattattatagatcaaataatttttgaaatcaagtaaaaataaatttgattttataaattagatcatgtataattattcttttaataatatattatattagatcaatttaaatttgactactaattaatatagtatattatagatcaactgggtaaattggtgagtatgttatgagtttgaaattagaagatctacaaaatgaacttgaaaaggatatgctgatagatcccctcaagttgcaatcagaatcagcggatatccctaagatttgggctaaatggcttcgttaccattcaaacgcgaagaaaaaactgatccaacttcatgctaaaaaagaagctgatgtgaaggatcgtatgttgtactacaccggaagacatgacaaagaaatgtgcgaagtggtgtatactgggactactgaaatcaaaatcgcgatcgctggggatccgaagattgtagaaaccaacaaactgatccagtattatgacatggtggtagatttcaccagtaaagcactggatatcgtcaaaaacaaaggatactctatcaaaaacatgttggagatccgtaaattagaaagtggtgcataatgtctactaaaaatgaaaaatgtgtagtgtgcaagtgtccggttccttctactggttatgtgactgaatccgggcgcgtgtgtagcactatctgtgctgactacatcgcagaaaaaacaaaaagcggcgagatcaacgaatccgatgatctgaatgaagttcaaatgttgctgtaggagaatcttatgattggatacggtgaaggaattacagatcgtgatgaacgtccggatctgttagaatctgacgaacatcctgatttttaggataggtaaaactatgccataggcatgacaaaccgattatgcgtaatgaatgaggcttgtacggggttctttgcctggatctcatagttccccattacggaggcaaaacgggcgatggaggcaacaaaatcgcgtcctaaatacatgtgtacccgaaaggggcttgataaaagaatgctggatgataggcgtactcttttgcgccgtccgatggagtttaccttcggcggggtgattgataatataccttcgatcaagggcatgtgaatagaatagccagaatagtacagcactggcgttaagcaaatgtacaaaagccccttcctttcggttggggcttctttttagaacttttcttcttctccgctttcgagttcggcctttaattcttcggctcgacctttcagcgcatcgcgcatagaaatatcgtctgacggcgcaacatcaacttcttttacacgatttttgtaatatttttcaagctctttaaggccgtccatagtacggcaagaggcgaccttgctcatgaaatcatcaatagccgcctcataaagtcgaaaatcgttgaaactcttcattttgacctctaaatttcgatttgtttgatcacgtagtcaaacttttcttcattgtaaatgcgtactcgttcgattgcgtgtttcataccatagtttttgtatgaatatttatttttagcatttttggactttgccagcgttgctaagttatcaaccaaatcccaaacagtagcaagagatttagaatcatgtttacgcagtacgcgcccaattgactgtttgactataacagcagatttgcaaggatgtccgaagatgatgtgatgcaggttcttgacagaaatacctgtactcagtacaccaatagaaccgattacgatcagccccttcgttgattccgcgatccgtttcatttcgtttcgctcatcaatccccgtttccccagaaatgtatacaacgttgtcatatacctttttgagttgctcatacagccatttaccatgtttgatctgattgaacatcacaaacacgttttcatctttttcccttgccagtttcaacgccagcttacagatccatgcgttacgcctggtatgcgatgttatatacttgatttcgctttggtaatcagcccccttcattttcttaatctcatcctctttatatctcatgaagatggtattaattcgaaggttggtaacttgaccttcctgcatcaaccgatttgtatcaactggcttgaagatttgaccaaaagcgccaatgtattgcatcatgtttgctttgccttctttcagagaaccagaaaggccaaacttgaaaatacactgatccattgtgttgatgatcttctgtatgctttgtccggttgatttgtggcattcatccaccatcaaacacatgaactgctgaaaccactcaggaggcattttaacagccgattgccacgtagacacgtagatcaatgcattactgtttttagcagttcctgaccgtattccaagcattgcctcgcgaggtaaaaggcgatagttgacgatatcaccgatcatctgatcaacaagggcagttgttgggacaatgattagtactttgcctgtgtaattttccagacaccaacgagatatcaacccctgaataagagatttacccgctgacgttgggaggttaagcacagcacggcggtttttaatcgcatgaaacaccgattgtttttgataccaatacggatcaatttgcttgtttccgtcgtatactgggtgttcttctaaccacttgtcaaaatctggctgggtaatttcttctgtttcgtggatcttaggatccatccagatagaatacccgcgagactccgcgaattttgttacaagataggctaaaccgtagggcagtttcccgttatagtccatcaagtatatgtagccgttccatccaccatatttgtattttgcctggtactgataacctggcggctggaagctgaaatagtcgcgcaattcatagactatgttagcctctgcctgaatctgcacatgactagtgttaaggaatttgacttcgatatccactatgtgtatcctatatacggtttatatgaatatttataggctaaataatgataaacattggagaactacaatgagtattgattacgaaaaggttgaaggtttcaaagccttagaacaaaaagaagccaaattacagcttgctacctacgcgcaagaaacgtttgatgtcaaactgaaccgtcagaagtcattcgaaaatatgcttgctgatctggaagctgccgtaccggaagaaaaaccggaactgttgatcgactcccctgatccggaaatggttacatacgaaggtgaaccatctgttcctgatgttgctccggaaattgccgaccagattgaaattgttcccgacgctctacaagctcctacaagcgattctgagacggtttctgatgaactggcatggatggaagggtttaccccgtctatcatcatgatgggccgctctgtttcgaatactggcttttatacgtgtccgtattggatctatgattggatgaaacaaaatccggattggtataagcaccctgatggttgtcctcattattcagcgcgtcaaaccctcaagtcactggcatggtacatgcaccgtgatgggatggttactgtacgcgaaaccagaaatagccagttcgacacgttcaaaaaataattttaaaaagtagttgaccttaccctgctgttcgagtatatttgtattcgaaggcgggggaatggctctcgcagtgaagaaggaaatacaaaatgaacatgatgaaaaatgcttactacccagttctgtttgtttgggctaatggtgaagttaagaaaatcgtcaattctaaagctccttattacactgtaggtgaagcacttcgccacgctgcggaagcaaattatcctgttcatgctgaacctggttatgctcgttggaacggttctaaatgggttgctgatacctgggacaactacgaagaagaaagaatggagtgtgatcctgattacgtatctcgtcaaatggaagctcatatgattgcagatcgtagactggataatgaagctcgcggattctattgattaacaaggggctacggccccttttcttttaggtgaaatatgaacttaaatcacgaatgtttaaaagatttgagcggattggtaacgttatttttcttgatatcgatggcgttctaaataatatgcggtgcatgaaatttggtgaacatatggacatcgaatgcgcacgacacttacgccggatagtgaatcacgctaattgtgatatcgttatttcctctacgtggagaatcggcaacagtacccataatctacgtgaaatattttatccgtggggattgtatcggatcattggtaaaacttgcactaacttccctcatagcactggaatgcgtggtgatgaaatcaaggcatggatcgatactttcggatgtaaaaactatctcattcttgatgatgacaccgatatgctttcttcacaaaaagatcattttattaaaactgatgggtttgttgggttgaccgaagaacaatccacttatgcgatccgtaacattttcggggttactactccgttttgtcctgaatgcaatgggtatggacgtgttaacggctacgacaaatgcggaacgtgtaacggtaaaatactccggctataaataccaataaacataaagaggttaaatttatggcaattccttctgtaacaattagcgccaacaaaaacgaacttttgattggcgaaactttgaccttagaggttgaaactactgaactagatccgggtgatgtgtttctggcctatcgttggcaaaaagatggtgtagatattccaggcgcaaccgccgatacttacacaactacggttgacggtacaactgctggcgattataccctgatcttaaaacacggtgctgatgaagaatcagcaacagaaaccacgtctgatacaatcaccgtgaccacttatccggtaatcgcatttggtactgatttacctgcaacaaaatctgttgttactggtaaagaacttaccctgactgttgcggtaactggcggtaaaaccccgtatacctatgtatggaaacgtggttctactgttgttagtggtgattctgcaaccttaacaattagcgcggctgcaagtggtgatgttggttcatatacggtagaagtgacggattcactgggtaacagaaaaacttctggtgcttgtgctgttagcgttacacctgctcttgcgtttgataaaaatctaagcccgaccgcttccgtaacacaggattctgcattgatccttagtgtaactgtattgggtggtacttctccttattcttatgcatggactaaggatgattctccggttggagacgatgcggatactcttacagtggcaagtgcggctctggatgatgcaggttcgtataaagttgtagtcactgatgcgaattcagataccatcacatcaactgtatgtgtcgtaactgttaatcaaaattatgatgatctcgtttctaaatggacggttcacccgattccgtggcgtgataccagctttaccccgatcggttattgggtacttgatgaaattctgtatcaaaaagcacagggtaaagattggaaaactgattatgctgattacaagtatagtgaggaagtacaaacgatcctgaaagcgttcatggaaaacggtgaatgtgagatccaggattcacgaaacggctatattcataaaatgagtgaaatctaagaggctttaaatggcaactgaaaaatggactacggttcatcctattccgtggagaaataccagttttacatatcttccatactggctatacgatattatcgttgatgcttttgagaaaggcgacgactggcgcgattatgcggaagaaaaatataaattagagtttgatactctgaaagaggcgtttgaagattatggtgatattcatgtaatcgaatctcgtaatggtaaactggttagtctgttgtcattgactcctgctcctgaaccagatcctgaccaataaaataaggcaaacaatgaatacacttctttttgatttcgacgacactttagcagaattttctcaggctttttatgataagttcggtgtacgtccggaaggaacgccaaaagaacgatatgacgaaatggcggcttctttggtgcgtactgatttttataaaaaccttccccgtattcaggctgggatcgacctccttcaatggagtttccaacgccgaatcggtgatcctgctactttgctgcttcgcgcggaagcggtcagccctctttgggttatgaaagaaaaactgaactatacagataagatttgcgctgaactggggatctctcgtctcgattttagtcgcattgactatccggaacagttcgcagaacacgcctatcgtggtgttctgatttcccgcaaccagaaacatcttgaaatctggaacaattctcatctagctaataaagttcctggtattttccttgcggaaacactggaagaaaatattcagctagtcacggaagcgcttgcaaaggctaatcaataacaaaaaagggaaccgcaatggttccctttcttttacaatctttttaattcatcaagcgctgttttcttatcaccaacaaagaggattgctttacctcctgcttttctgaaaggcaacaccgcttttgcccgatcgtcaaatagaattcctttaccagcgaatgctgctttttcatggctacttttaacgtagtggaattctggaacgtaacccaatactttttgcaatgctttacgtttttgttcggcaacaccgtcagaattgaatttaccgacactggttagtattgctacatcaccaagtgttcttaaatgatggaataattcaaatccttctttgattggttccagattttcgtagaaatcagttttggcaatttttgctttgcactttttcaactcatcttctgtcatcatagagggttcgccatacattggcacaaatgaaccttcccagtcgaacaatacaccatccatatcaaagaaaaacttattcatatcaattcctcagtttgtgtatgcatactataatgtttaatcattaatgtcaaccccaagtgtcagttttcggtgcgtatgctgcaactttagccacaatttccttatccagttcagctacagatttctgaggcttaccacgggctttaactttgatgtagtttgacttaacaacaaacatccctttgttacttgatttcttgatctcgctgtcaacaccaactttgttaaaactgatccaaatgtctccgtccatatactgtttaagagaatcacccatgttcaggatcttcgccatagtaagggccgcgccttcgtgggtatccatgagaatttctttaggaactacacgatcgcgtttctggttctgctgcatagcaatatgaacatcgttcataacccatacgatatgtacgttttctttcttgtatcccagcttttcgacatcacgcgcgatgcttgccagcttgctcatgccttttaacgttacgtcaaagatgaggttaggtttacgatcttctggtgctgccataataccggaataaacacggttttggtttttgttggaaatgttgaaaacgtcggcgatcacatgatggagggtagatacgttttctgggtttttgaggttcattgttttgacatcatggcccgtttgtttcttgatctctgctgcgagtttatcgctacccattacaagttttttcagggcgtcaacgtccagggtaataccttcgatgcctagcagtttttccagtgtgaaccctttaccggaaccagcaccgccagccagaataacaacctgaccgaacttaggataagcacggcccccgaaggtgatcagcgcttcggttaaggtgctttctgtgaattgtttaaatgacttcatgtaaaattctccagtttattttctattatttattgacatgctttctgacagtggtgtatggttactgtgttcgacggataggccggaagaactttaaaccataaggtatacgatatgaaaatcaatttacatcgcttcattgcagacttttcccgcgaccgcgacatggattctttcaactattactcccgtgagattgaagatcgttttgcggctcatgttggattccgtcgccaccatacccctaaaatgcgtcctgaccacgacccgaagtatagccctattatgtggcaagcccctatcgatggttacgttgaagggatccggatcatgacgtttaacgcgatgtatggaaacgctttgatccatatcgcacgtgagaaaaaggcggaatttcctaacggctggcgtattgatgaagtgattcaaaatcttatgcagttacgacgtgaatacaaagcgggtatgtgtctgcgtaatgaacagtatccgatgtataaaacatatgcctatatctctaagcatctaattaattccatgttttacatcgttggtaatcatggttccgctatagatataggttcttatgaaatcgtggcttatgctcgcgaacaaggaaaggccgctgcactgaaaatcatcgaatctggtgctatcattcttaaccatcgcattgatactattgcttactatggtgatcaggttgaggttgaaggcgtacaccatgaaagattcaacaaagctgtatttactaaaaatggctatgcgtatggtaatgaaattataacttctgctgttcctctcgttcgcctaactgttgaagggtttggagaaaggatgccttataaaccgtcagaagctcaaatgtgcgcggctgctgaaagaatcgccaaaaagcggaaaatgtataccgatgaatacctggcgtatgtcaacaagacaaaagaagatgtagatcgagaaatttcttgcatggatttataactttgatataatctaagcatctttttaagggaggatacatgaaaacgatacattgcagaaatgaaaacgttgtttactatcacggttcgtgtactgctgctggtattgaaagcatgttattgcctccctgtgattctgatactctgtctgaaaaaggcaggaagaaaaatttagaccgtgttttctttaccgctgatatcgggttagctcgtatatacgctggaagggccgcgcgttctataggtggggatcctgttctgtacagggttgtgtgtccggttgatgttgtatgcatgaatgaagataaaggcgcgagcgtttaccatgcagcatgggcgttttgtgaggaattatgaatgataaagtgttggcgtatctcgttttcttgctgggatatcgcttagaagtgatgggcgcgtattcatcaatgtatggtgatttaacggctatctggatggtcgggttaggggttgcttttacattcctttcctttgcaattgttaatgaatcggaaaaggatattgtatgaaactatatcatgtgatctactctggtgttttaggcattgacaaacaaatgttaattgatgtaatgtgtaaaaaactcgatgaacgaattggaacccgatacaaaaatcatgtatcggaaagtattttcatcaacgttgaccatccaaatgacatggaagaaatggtcaatactcttgatgatcagcagatcccgtttgttgacaatttcaacatgagcgctggagtgtatacggtagtaacttttgttctaaaaaatgttgacagccgaaacgatagcgtgttgaatgtagttgcaaaaatcgattctaccaaaggaaaataatatgaaaattgtacaccgtagcatttccgaactgtctcaagccgaaaaagtgcaaattcatttcaaattcaatgatttgcgtaaaggttatgccgaaattgcccgtgaatatgggttagataacggcgatatttaccaggtagtacaggaaattgaacgtattcgcgcgttccgttctgcaaatctccctgttaaaaatgcaatgcgccgcgaagcgatcgaaattcatcgtaagcgtgtgtacaatttagaacgtgctaaacgtccgatgaagaaagaaaagaaacctcgcccgtttaaacgcgaacatcttaacacctctatggcgctggcgtttcaagatgcggggattatctaatgcgtaaatctgcgatggatcgttgggctagtattgctacttcaaacgtaaaaccaaatcaagccgcacctgatgtagaagaggttcgtaaagcaaaagaacctgagatcgtggcccttagccctgaactcatcgagcatcgccgccgtgcgtctgctattgaattggatctgcgtattgcgcgttcatacaatctcaagcatgaacacgccgcaaagaacaaccattcttttgaccttactctggaagattggaaagtattgatgacaactgaacgttgtcagtattccggcaagatgtttagcaataaaccaggtagcccgtatgcccgtacaatggaacgtattaatccacgtctgggatatacacaagaaaatacaatagcggttatcaacgccgctaatgccgaaaaatcacagcttgatgcattcgttaagggtgatgtcattctggatgaagtaaaagtgaagttgctgcgtaaagcactttatcaagtcgaaaaacgtgtgaaaatgaaaggttaaattatgtttacaaaatattcttctctgactaaccattatgaaggtaagttcatcaatggtgtaattatgaacgggcttactggcggtgtgtgggttgcgcgtgaaaagatccacggtgctaactttagctttatcactgatgacggtgttaccgttacccctgcaaagcgtactgatgttgttaagccaaccgaagatttttatggctgttcagcagtagttgcaaagtattcccctgggatccgtaagatgtgggaaaccctcaaaaagaccggaacttatgatgatttggttattcaagtctacggtgaatttgcggggcgcggtgtacagaaagatgttgattacggcgaaaaagatttctacgtattcgatatccgtgtaaatggtgaattccttccggataatctgtgctctctgatctctcgatctcatggccttaaaatggccccgttgttgggatatgggacttttgaagagatcaaagaactgcctctcacgtttgaatcggttgtgaataaagcaaatagcggtattggtagcgatgacacggtctacggtgaattcatttatcctatctcggaagttgaagaggggaacattgcagaggggttcgtaatgaaacctgttctaccttctttcatgccaaacggtgaacgtgttgcaatcaaatgcaaaacaaccaaattcactgagaagaaagctaagaaagcaacccgctttaatgctccggtttcactgtcagaaaaagacaaaaaccaactcgatgagtttgtttgttaccttacagagaaccgtgtgaaaaacgttctttcgaaactggatctggcttcgatcactgcgaaagatttcggtcgcattatgggcttaacggttcaggatgctatcgaagaaatcagccgtaatcatgggcctttcctcgaacagttcgaagacccagcaatggctaaaaagctgtttgtaaccgaagcccaaaacatgattcgccctgtatggggcaaaatcctgaaccatgaattttaatcagattctggttgatgcaaaagcggctaccctgatcggtagccgtaaacctcctgaacgtatcgcaaacattgctgttaaaatcggacgtgctttgaacgaacgcgggattagggcttattctggcggcgctcctggtatggatagtcactttctgtttgactatagtccggataacaggtgtataatccttcctgagaacggttttaacggccttttctcaaacggaaaggatatcatcgactttcgagatttaaacacacagaaagccgctgatgaagccagaaaggtagcaggtaacttcgatacacagaatgaatacgttcaaagaaggtatgcgcgaaacacgattcaagttcttcgtgaaaatcttgacaatccaactgattttgttttattttgggcggaagaacgtgaaggatgtgttaaaggtggaaccgcgatcgctgtaagattggctaggttgtacagggttccatgtttcaatctcttcaaagaaagtgtattgaacgatgtgtgtgatacgttagggatcaatatcaaacccccaacgttggattttttatggtaattgaacatgcgcccttacttcgtgaaacatacgaaagatgggctgttaataacgcaataggtgaaaatatgattcatgtacgtagtatcggtgctgacggcgaaactccagtagaaggccgatcgcccactctcgcagaacgagcaagagaaattatcaacgatcagaatgctaagatgatcgaacatgcgcgggatacaatcacaaaaggtgttctgaaacacgcgacacaacaaaaccttatctatgatatgaagcacgatatcggctcttgtctgggtattgaatgtactcgctatgcattccaacgagtttctgaatggttggaagaagaagggctaaaattcgatacagaagaaaaacgcaacgccgctaagatcacaaattctctggctagtaagtacaatcaaacgtatagaaaccaggaagaacgtgaagtgttcggtttcaaaattcctgaaaggaaaacagatcgccgtgtaagtgaattcactttttacattagttggtaaaaaggtgttgacgggggttggttatagtagtattctaactcccgtagacaagacactaactcagaaggataaacatcatggaaatcgtaatgaaagcaacttatgctggatactgcctggaagcaaaaggtgttgctaacaatggtaaaggcttacgggccaatgttgaagcaatgctggatgcattacatgcaatgtacgaatatgacaacgtagcgggtagtgttcttatccaggcgttggaagtcgatggtgttgattgtgctggttggtgggatgcttacattgactacaacgataaccgggtttacctgttgagcaacaaagattatttctaaggaaccattatgagcgatgaagctgaggctttagaagattgggctgattttgatgacgaagaagacggtgaatatttctgcgttaatcgtggtgcttataaagaccgtttagaactccgtaaacttttatcgggttcctctcaaatatcaggatccaaacgaaaaagtagtaaacaaaaagttcagtatagtgatggttctgtacgtgatgaaactgttgttgctgaattccgtggtcgggttatcacaaaagaaagacaaattgatgtaaagaacttgtatgaagtggctaaggctgctaaaataggttctgtgattgtttgccctgtgtgcaaagaaaaacacacaaagacaacgtatcacaaagttttctgttcgaatggcagaaaaaccagtaaggattgtaagtctaaatatcacaatacaatccatcccgaacgactggatcgggtattttaaaataaacctaaaacgtggagtacgtttatgaacaacaaaactttcgaagaactgaacagcatcatcacttccgtagattcctataaggtttctcactggtcgcaatatccaactggctccgaagaggcgctgttttatattgaatctcgtggtggtaaatttgatcaagtagttacggctggctgtaaccgccttgcgcaaatcctatcacgtccggtgactatggaaaacgtagattttgctaatcggttgtacaaaatgcactttgggcgcgaaatcttcaactacaaaggttggaaagaaattgcagaactgggttacatccctcttgaattcagagcgattccggaaggaaccccagtagcggttaaaaatccggttgcaactttccatgctgggaaaaatgcgctgtggttagcaggacacgtagaaaccctggcgatcaggggagtatggttcccttcaaccgtagcaactctatcccgcgaatgtaaaaaagtgttgaagaaatatctcaagaaaacctccgatctcgaaggtgaagcatttgatatggtattacgtacccgtttgcatgacttcggcgcacgtggaacctcttctgctgaatctgctggtattggtggcctcgctcacctgtataacttcctcggtactgataccgtagaagcgctgattatggctatctctctgtttgaagattgtcagaaagcgtttgatgatggtgaaatggcggctggtatttcaattcctgctcgcgaacattccactaccgtttcttacggcaaagaaaacgaagaccttgcatacaaaaacagtattgagatcttcggtgaagggatgtatgcatgtgtgtatgattcctgggattttaaagcggcggttcgccgtatcgcagaatataaagattctattctttctaagggcggtactctggtagttcgtccggattctggcgatatggtagacaatatcatgtacgctcttgaagaactgggccgtatctttggctatacagtgaactcaaaagggtataaagtactacacccagcagtaaggatcattcaaggcgatgaaattcatggccctgaaacaatcaatcgggtgttgaactggatggagtctaaccgttgggcgtctgaaaacatcgcgtttggtatgggcggcggattgcttcaagaagttacccgcgacactcaaaaatatgcgatgaaaatgtgcgcaatcaaaattaacggtgtgtggactggtgtgtataaatgtccaaaaggcgctgaatggaaaaagagtaaaaaagggttgttaatgactatcactgatggtgttaactttaaaaccattgatactctggaacagaaagtgccggaaggctggaaagatgctatgatcacatactatgtcaacggaaagattactgcccgtgacactttagaggaaattaggaaccgtgccgggatttagtatccgcaaaaacgacaaaggaaccgtgattttctatgacaacattccccttgtagctcgcaaggggctttttgctaaaatcgctgggtattcctttaaactggaagaagtcaacgacgaaacactaaaagagatcgtaagaattgccttacagttaagaggtaagaaagacgaacagaaagctattgacatgatcaataaattgggtgaaactcaatgctttatagtgaatcgtggttacaagtacgataccattgcaaaatttgaaaaagggctttgtgaattatgagttattatggtgtgatcccatacacaggaaacaagcaatcgctattacctgaactattcaagctgttccccgaaagaagttcatacatgcgtttcattgattgtttttgcggtggccttagtgtgtcgctaaacgtccctaaacccgttctaagcaacgattatgataagacgctgattgatatgtatgagcgtcttaaaacgcttcctgacctgtctccggtgcgagaattgattgcatcgaaggggctggggaaagacaagaaagaagagtatctgaaattccgtgatgaatacaaccagaacaaagatcctttatggctctatgtcctgatcctgcattcattcagcaacgttaaccggacaaacgacaaaggcgattttaacgctgctgtaggaaaacgaaccctcaactttatgacagaaaaacgtttcgaacatttcaaaaagaatgtgacaggaattgaatttcgttctggttcatactctgatattgaaatcaacgataacgattttgtttattgcgatcctccgtatctgatcactgatgcggtgtataacaaattctggaacgcagatcacgaacgcgagttatatgctttccttgactccctgcatgagcggggtatcaagtttggtttatcaaacgtgacacatcatgcaggaaagcaaaatgatatcctgatcgagtggatgcaaaaatataatgtgcataacctcgataaaaagtatctgttaggccagcatactgattcttacgaacaaaataaaacgcaagaagtctacgtgtgcaactaccagaaacgcgacgtaaatacataccctgaaacactggatgacttaatgtaaggtaacatatgtttaagatttttggttatatcccttctgtttacaattgcgctccatgcctgaattctaaacgtctcctggacgcaaaacgaaaagaatatgagtttgtttctgtagccgatgaaaaagacgcagacggcaaaccgatcctgaatgaaacggtcatttctgaactcgaaagcctgttaggtactcgtagactgaccatgcctcaaattttccacgatggtaagcacatcggcggctttgaccaactgcgtgagtacgttcgcacgttgggataaatattaacacctttatttgattggtgttattatgctcactaaacgtattactaagaaagattatccatccattaaacaagctctttttgaacagcaaaacggcttgtgcgcgttatgtggtcgccctttagagggtgaccttgaaaaacatcaccttgaccatgatcatgctctatctggctctaatgccggacgtgtgcgcggcctcctatgtaacctatgcaacggtacagaaggtattgtaaagcacaaatttaatcgttctggtctggtttcccgtgatgttgattacatcgaatggctagaaagcctggtagcatacctcaaacgcgactattcacaaaaccgtatgcacgacaaatttatacccgataaggttaaatggtttacacgcctgactaaatcggatatgatagccgaaatgatttctatgggctttgagtactcagaaactgaggatcgcaaggctttagcaaagagctatagaagacaattaatgaaggcaaccaaatgaaatatctaaacgctcgattatcaacgaaacagaagaaaaagctgatgatgttgatatccgccactgacaaaaataccatatctctgcatgattggatgcttggaatgggtgaatctgatttgtgttatgtcaaaccaaaagacagaccgatgtttgatgatcgcggttgcacattgactgctttttcttctatccccgttattgatatttggaaactccttgagattgtaggacgggatatacctgttgatggagttgaactaatcaaatatcttaacgaaatcggacataatttagatattatccataaggcaacgaaatgaatgtagaaaaacgagacggaacaatcgtcaaattcgataaagaaaaaattcgtaacgcggtgtataaggctggcggtacgatgacggatgaagacagcgcaattatgcttgtgttgcatagtcagatccgcaatgacaaaccaatgaaaatttcacgcatacaggaacttgttgaagaatctttaatgaagacaaatccgactgttgcccgtgcatatatcgaatatcgtcatgatcgtgatatcgcccgtgaacaaaacggaaaattattccgtgatatcaagggtttgatgactcttagtaacaaagaattaaccaacgaaaacgcaaacaaagattctcgcgtattcccgactaaacgcgatcttctggcgggtatcgtttctaaacacatggcgcgtaaccatattctaccgaaacatattgtagaggcgcatgattccggtgatattcattatcacgatctggattacagcccgttcaccccatacactaactgctgtcttgttgacctgaaaggcatgttagaaaatgggttccggatgggtaacgctgatatcgaaccgcctaaatcgatcggtgttgctaccgctctcatggcgcagatcaccgcacagattgcttctcaccagtacggcgggacaacctttgcaaatgtcgatcaggtgctggccccttacgttgaaatgacgtacaacaaacactttaaagatgctgtttggtacggggttcctaaatcaaaacagtatgcgatggaaaaaacagaaaaggatgtattcgatgcgttccagtcatacgaatatgaagtaaacaccttacatactgcaaatggacagacgccttttgtcacaatcactttcggtatgggtactggttggcgcgaacgcatgatccagaaagcgattctgaaaaaccgtattcgtggactgggtaaaaaaggcattacccctgtattcccaaaactggttatgtttatggaaaaagggattaaccttaatccggaagacagaaactatgatattaagaaattggccctggaatgtgcttcaaagcgtatgtatccggatattattagcgcggctaataaccgtcgtattactggctctagcattcctgtatctcctatgggttgtcgtagtttccttagcgtgtggaatgatgagcacggtaatgaaattcttgatggacgtaataacctgggcgttgtgacaatcaaccttcctcgtattgcgattgaagccgaagcacaggaagatgaagacgcgcatgatgcattttggcgtatccttgatgaacgtctggaactgtgctttgaagccctgatgactcgtatcgatagcctacgcggtgttaaagccagtgtagccccgatcctttatacagaaggtgcgtttggtgtaaggttgaaacccgatgatgaaattctggaattgttcaaaaatggacgcagttctatcagtctgggatacatcggattgcatgaaactctgatgcttttcggatctggacaacacccattcgaccggatcggttctcagaacatgggtagactgattctggaatatctacgcgctgcgaccgaagcatggaaaaagaaaaccggatttgggtttagtctgtactcaacccctgctgaatctctatgtcatcgtttctgcaaactggactatgagaaattcggaagtatcaaagggatcacagataaaggctggtacactaacagttttcatctggacgttgaccgcaaggtaacacctttcgagaaaatcgactatgaagccgattatcattacattgcaactgctggacatatcagctatgtagaattccctgatatgaaaaacaacctggaagcccttgaaaaagtctgggattatgcaatggataaactggactacttcggaactaaccttccggtcgataaatgctttgaatgtggctctgatgatgaatttaagccaacagaagacggttttcattgtacccattgtgggaatcaggatccggaaaaaatgagcgtcacgcgccgtacatgcggctatttgggtgctcccgctgtccgtgggttcaacgaaggtaagaacaaagaaatgatgcatcgcactaagcatcaaaattaatcaaaaagcccttgacttcggttgagggcttttgttatattgggcctatcgaaaaggagacatattatgaaactgactaagaaaatgaccgatgtagtggcatgtgcgtttgcattaggctacaaagttgaaaatcatccaactcgcgttgaagtcatcaaccctatcaagggccgtcctggtttggttctgtgtgaagacggtacagcatatcgtaatgatgtctctttagaactggcaactactatccgcaccgcaaaacaaatgaaagatgttctcattagcggcgcaaaatgaggaatttataatgtattggacaaaagataaatttgtttttcgtgatgaaacgtgctttgggactgcataccgaaacttagctattcgtggtggttcgttttcagctaatgatttgtctaaggtagtattccctattaaagttactgagtatgacgtattcggtgttaaagggtttactgattactttgatacaaagtttgaatcagaatcttacattttcactaatagcgatcgtgaattattcaaaaaacacgttgttgttaaagagaaaccgttattaccaaaagaagatgaagcaaaggaaatctatgatctcctgaacatgcttgataatcttggtacttgtcatctgttcgggaaacgcgcccgtaaagcgaaagatgttctcaatctgttacgctctcgccggaattacctgatccgggaagcagaacgtaatctgaaaaattcagaaaaacaggtcgatgttcataaatccactcttgcgaaattaaaggctttgtgatgtttccgttatacgctaaagtgcgtcgaaatgtcggtgattcgtatcaggaatggagtgaatggctacgcgaaacaaagtcattctacatttcaaaagcaactgatatgaaaggccgtaacattcgctatcgtaaacccagtggtaagcgagtgaatgggatagattacattgttcttgattcgattcgggatgatataaaatgattagcaagatccttgataagttatttccttcccgtattgctgaacgcgagaagagacaaaatcgttttcagaacgctattgactatctcgaagaaattcgatttcagaaattcctcgaagataaaaagatgcgtgaagatgagaagcacccaaattctaaaatggctgacggtgtaacaaaatgtgctgttggtcggacgtggaaacgaaaagactacaaggatcttgtttctgctataccacgcggaagcctggaagattactcaaaagcaactggccgatcttatatcggatgtcttaacagactctgtatgattggtgttgtcaagagaatgactcctacgtataatcatgtttatatggctatcgtaaagaaaagaaggttgcaattctatgcagcatctggggaatctatcaatctaattgatgatttaattgaagttgggtatgtagacgacgggaaaattttaaaagctcctgattatctacgcggtaaactattgaaataggtataaattatgattttcaacaaaacaaattcacgtaatttgaactatctacgctgtgaactggaagctaacgaaatcgaactgtttttctgtggggctacagatccggaacacaaattgcattgggtatcaggtgagattgtaagcctaaccgatcagattgtcgaagaggctacccgccgcgatgcaatcgttaaaattggtgctgttgatgtgaactacgaaggacatccttcatttttcattcaatattatccataaaagcattgacctgtatgtctgaatgtagtaacatccttcttgtcaactaaggaggatgttatgaaaatcaaaaacactgctactgaaactctttgtaacgaaattgcagaaatgtactggagtaaaggtcacttagaggctatgaaagagtttcaaaagtggtgtgatacccaaaagttagctaaatgggaatacatcgttattgttgaacggatcaaagaattgatccttgtgaagaaaggtaataaataaccatgtaaatcaacatggaacccaatatgaactatcaaaaaatatacgattctctcatatcgaaatataggggagaacctccaatatcttacagacacaagaaatcaggttacgagattcatcacatatacccaaaatcaatgggtggatctgatgaaccagataacttagtatatcttacaccaaaacagcattatactgcacatcatcttctgtctaaaatatatggcggtactatgcataacgcattttggattatgtcattttctcgtgggtttcccatcacagcaaggcagtataaaactgcaaaagagaataaaattctcaatcaaactggaagaaagcattctcctgaaactatagaaaaaatgataaaatccagacaaggaagaacgtattctattgaatcgcgtagaaaaatgagtgaatcacataaaggatattctcatagtgaagaaacaaaagagaaaacacgaaaaagttgtttagtttctaaagctagatttgtgaaagttgctatcgggacgaatatcaaagatccgtcaattgttatccggctgtgcggaaaaactgatatacgcaatcacggattcagtcaaggtaaggttcattcttgctgtcgcggtgaaataaaaagttataaaggctatacatggagatttgaatgaattatattagaatttataacatggatgtggtcaacggaaaagggatccgtgttgttttgtttgtggccggatgcaatcataagtgtgatgggtgctataatcgcagttcatggaatccttgcaacggaacaccgtacacggaagagacagaaaaccatctgatttctctgttgagtaatccgcatgttgatggacttacattaactggcggcgatccgctttaccgcgacaactatcctactatcctaaaactgcttgagcgcgtttctaaggaacttccaaagaaaaacgtatggttatggacaggatataccctggaggctttacaggccgacccagaacgttctaagctacttccttacattgatgttctgattgatggtaagtatgaaaaagatttgccaacgaaaaagccgtttcgcggttcagataatcaacgtatgatcgaattcgctaaaaattcgatagaaattaaaaatattgcttgacctaatgtgtaactatggtaatcttaccacatcgtaaatgacgattaactttaattgagagataatatcatgatcctgaatttcaaaacccgtaaagaagcgcgtaactactgctggaagtggaacattcccctgaaaaccatccgtaatacagggcgcggttcttgcccgtggacagttcaagcaaatgaactgaaaacgttcgtggttggtaaaacttacaaactggttgaccgtgaagggtttactaccaattcacacggcggatctaacaccgcaaacactatccaggcgagacagatcgaaaaattcctgaataacgaggtaaaaattatctcgaaaaccaattcagatactttcaaaattgagcatactccggaaatgacttttagctctctgcgttcgtgggaagctcgttatttcgtcgaagttggcgcggctccggttaagaaaacgaaagctaaaccgaaaaaagccaacgttacggctccggtcgcacctgttgcaccagtaacagcagatcttgatcaaatgcttgatggtggttcggcaatgtcggttgaactggatcctactaaatttgttgaaggccgttcgtatgttctggttaaaccgcagcaatttaaaaatcgttgtggtgctaaccacgggatcaaatcatataccgatgaacacagtaatggtgtatacaccgtttaccatacgacttcgctcggtcatcatcaattgagcaaaacggtagaaaccattgattcccagaccggaaaagttggttactacctgcttgattctgaacgttcgttcttccgtgaactggcgacaggaactgttgatgaacctgttagcgtttccggtaatagcgctattgctatcaatgtagacgaagcggctaagaaagaagaaatcgcaaaagcaatggcacagcttgaagaagcggttaaagcccatgatgacgcgcttcaaaatctgcgtactgcttccgacctggttcgcaaagctgctcgaaaagtagcagaagtaagcaagtaaattaaactgggtgctccggcacccttttttatgaggtgacacatggaattattagaaggtaaatcttataccctgaacattgacgctaaagaatttgcagaaaaaacctggcgaaatgctttagctgaattgatcaaaaacaacggctatatcacaatcgatcgtattgcgattggggatactgaggacattgcttatgttctgcaagatgatttcgaatatgagatccctagccatatctggaaatacttcaaaccatatgatttgccggaagaagaaccgaagatcgctactaaagaagaaatcgccgcgcctgatttaaattttgtatcttccgatcctaaaatgtggatgactgtaaaacctgttcaacaagatatcaatgatctgcgatttgattatccttttgtcaagcggatcacttcgatttctgtactaccagcgccgacggattcacaggcacttgaatttgcattacagcatgttttcggtgataataagctgtacgcgattgacaaggaagctgctattgatgaacagaaaaaggaaatcatcaaccttctttctctgcatcaacaacttgaagcggtggaattgattgagcgtatgctttctgatacaaagaaagatatcattagcaaaatcactccggcacgaaggaaagcaattgatgaaaatcgagatttacggtattccagaatcgcttcataaatgttatggttgtattgaagctcggaaattacttgatgagcatggattagaatacgaattttattctgttctaaagccagcaaataacagtgtggggtttgattacgatagaccccgcattgaagagttagcgaaacgtgttcgtagtcgaagcatggcatttacttaccctcggatctttgtagatggtaattttattggcggttatatgcaattgaaagagtatttgggtgaagcatgaataaagaatacattcgcaaagtagcaaacgctattcacgcaacaacgattgattttctggaagggtttgatcatattatccatcccgaaacgttggatagttgggaagccaaactgtttaaaagcatcaatgaacagtttccggaaaaggttaagcgctggtttatcagacaggaaatcgtagcaacgatccttaatgaacgtggtgttgaggcgttcggtgtaacccctctatataagcgaaaccagattacagacgaaacaatcaagaaatataaaaagatggttcggaagtaataaataatcagttaaatggccttcgggccattttttgtatataaatattggtattgaatacaatataggaaaaaagataatggtagctaaatcattccgcgcacgaagtggccttgatgctgctggtgaaaaagttatcaacgttgggaaggctgatcgtaatacgctgagtgacggcgttaacgttgactttttcaatgaatttaacggaatccagcagtatgacccgacccgtggctattctcaagacatggcgatcatttatgcgcgtcgtatctggtacgcaaaacagaatattgcttcccctgctggggctttcgacgaatcaaaatggatcgcaactcgtaatgacccgaaatgggtttatagtaacgtaaccactccagacggtagcattattgaatctggtagttacattatggctgatggacgctttactgaacttctgtacctgttgccggacaacccgacagagggcgacgtaatcacgtttaaagattgcggtggtttagtaggtgtgaacagtatccttgttaagtctaacacccgtcagatccgtttacgtactgtacaatcagcacagtatagactgactcacccgtacatgatcgcaacgtttatctataacggtaacgtatggcgtgttgctgaaactctggacaaccgcgattctgagatcgtgaacgcaaccggaacaggttcattccagttacaatctggtatgacagttttccgtaacagtgctacgggtaaaatcactctccagttgccgaaatatgcaaatgatggtgatgtgatcacaacctatgacgctgataaaatgaactctatcaacgtagccgttttgcagatttatccaggtagtggacacactattactgatggtgcaagtactggtgttacttcggtaagtagccagaaatccggctttggtatgttcatctttgatgcacagaatagccaatggaaagtatatgatgctgataaccgtgttcgtctgcgtcgtatctatagtgatttaaacgcagttcctaacgattacgtttttgttactgcaaacccttctgggactataccaaacgttactgttacccttccaactgatgttgctgatggtgatcgcgtttacgtatccctttatatgatgggtaaaaaccagaactgtacaatcaaagttaaagatggtactacggataagatccgaaccaacaaaaatatgatgcagttcccgcagcgcaaagattatccgcctgatgattggtttagtgtaacttcattagcatttaatgctggtagcgattacctcccgtatatcgagttttcttatttgaaagctacgaaagaatgggttattgctaattatcgtccaatcgttgaacgtgttgatgcaactaacagatcgcgtactggtgttattgctctggctgcacaggcagaagtaaacaaaaacttggaagataacccgaacgacgaaaccgctattactccgatgacgttagcaaataaaactgctacagaaacccgtcgtggtattgcgcggttagcaacaactgctgaggttaacaaactttcaaccgatacctatctggatgatgtgattgttacccctaagaagctgaacgaaagaacagcaactgaaacccgtcgtgggctggcagaaatcgcaactcaggcagaaacaaacggaagcaccgatgatattactattgtaacccctaaaaagttgcataaccgtattgcatcgccgaccttgactggtatccttgcccttgttgctactggtggtactgcaaacaccaacacagaccgtgctcaggctggtactggaatttatgatcactcagattatcaaaaagcggtaacgcctaaaacactgcgtgagtataaagcaactgaattacaatccggtgctgtatggctggcaaacctgaatgaagttattaacggtactgttgcaagttctaacattccgaccgtcgttactccggaaatgttacacaagaaaacttctactgatgcgcgtattggtttgatcgagattgctacccaggcagaaaccaacgcagggactgattacacgcgagcggtgacgcctaaaacgcttaacgatcgtgctgcaacggaatcgctgacaggtatcattgcaattgcaaccactgccgaagtatcagcaggtactgtaacgaataaagcgatcgtaccgtctaaactgaaaggttatttggacgatacaagccatattactgttgctaccgctgacggattaactcaatctggtactatctggactacggttaacatcggtattcaatcagcaactgaaactcaacgtggtactttacgcgttgctacgcagtctgagacgaacgcagggacattagatacagtatttgtcacccctaagaagttacacgctaagaaagcgactgagagcgcagaaggtatcattcaggtggctacggctgctgaaactaccgctggcaccgttgcaaacaaggctgtttctcctaagaacttgaaaaatacaattcaggttgatacttcatggcaagctaccgatctggtacgtggtactgtgaagctgtctaaggggcttggtacttggtcgggtaatgatgtggctggttctactcttccggatgatggttacgcctctgtaggtgttgctgtttctccttatgaattgaacctgacgctgaaacattatctgccgatcggtgctaaagcggttgatgctgataaactggataacctggattcttcccagttcattcgtcgtgatgttaatcagacggttaacggggcattgactctaacgaaagaaaccactgtacaggctaacattaactcaaccgccgacgcgagtttccgggtaatgaatgttagtggagatctgaacgttggtgatggctcatcgatgggtaaacttcgtttgaatggcggttcatctaacgactggtcaattcaagcaagttcatcctctgggcgtattgcaatgatctcaacgggtaacactggcacagttcatctttctgtgtataatgatactcgcggcgttgtagctaacgttaaattccaggctcctgaaattcaggcgattggcaaagtgactctgggtaatgatacagtgatcacggctgctggttctgttctctctatgggtacgaacaacaagacaactaagatcctaacttcggacgctggtaacattttggcagaagaatcagggaactcttataaagtctttactgagaagaacgcgcaaaccttgctgaatcctacgtatgtacgtaaagcaggtgatacgatgtctgggcgcttgacggtaagcaacagttcaattatcattgcaggtcaagcggcttggtcaacgctggatgcagtaacagaagcatccaggggcaactggacggctgagatcacagcatcggcacaatacaacttgcttcctggttatgcggttccggttcttgaaccagatccgattaatccagaaatcatgattgtgacccgttatacctatgttaaagcaccgggtactttaacgcagtttggtaacggaactgcattcacttatcagatttgggcacctcgtccgacctctggtactggtgttaatgcgctggcgcaatccttctggatccgtcaaatgaacccaattacgggtaaatttgatggttggggccgcatgtatactagcaacaacccgcctactgctggtgagattggtgcaacgtctgctgttggtactacggttaaaaacatgactgttaccgattggatcaaagttggtaatgttaagatttacccagatccggttactcagacagttaaatttgagtgggtggcataatgtcaaacttaatggcggggttcggccccgattttgtagaaacgcaaattctatcggaaacaaacagcgtaacttacagaataaccgcaaaggcaacacatcccaatgcggttcctaatcagtatgagtttacactaaatcaaaaggcggtagggacaccgcctagtgttgggatcaacgtatggagaattaacaatgctgtagttgatccaattaaaaccttcacattatcgaatgataattcagcaactgcaaacaaagcgtttgttgaatatatggatgctcaaccttctgggctgtatttgataatgactaacggtgaatacaaaacaagccaaatcgttgatgattggtttgctaaaaacagatccgttatgtggcaaggcgctgatttcgctcagagattcccaaattctgcatatgttgcattgtatggggcttcaaaatctcgtatactgattgaatcgttttacgcgaacgatggagttttaaaagaagattcacgcgcatcaatcgatcttgtctatgataacgttggtgatgttgggcgaactggtgtacctttccgatctgttgaagatacggaagaatacaattcaaccaatgggtctgaatataaagtatatcctgttgcaaacccagtgatctctaaactggctgattatggtatggctcctggattagctatgatgattgctggtgatttttacgccagcaaagcattattggatgctggatcaacaacaagggttactgttcgatggtttacgggtactgctcaaacttcatcatcggtgattgaagttcctgcaaataaacctgatgagtggttacgatttgaacagttctatacgatccctagtggttgtgatggatttaacgttgctgtatctcgttatcctaaacccgctacggatagtttatctgcgatccgtaactttgtgatggttcaggtatctgctgccgaagctgatcaaaactttgctgcacagtttggggttaacggtatcagaatgaacaacatgatcgatggcggaacaccgtatatatttgaattgcctaatactaaggtttatccaggtggtgattattctgcttccgaattccgtgaagttgatgcataaacaaaggcccggaacatcgggccttataaatatgtaaaaaggggttattatggcagatttaaaagctggttctacagtcgggggtttacctatttggcactccggcacatttccgctggttccggttggtaatactctaacctatcgcggatataaggtttatactgaaaacgataaaccgcaagcatcaaataacgacttcgtttctaaagcaagcggtggtcaatatttgggtgtagttgcctttaaacaggggctacaaattaacgctactttcacaggcggaagtgaccagaacggtttatattctggtgatggtgatggcgcgacattatcaaaagccaacattgatcttgtatcatggtatggtattggtattcgttcatcttccggtactaatggtcgcgtattagtcatcaacgctcgaaatggtgatttaaacactcagggtaatattacggttgaaaagcaaatcagtattacaaccgctaaccctactgacgcaagtcatgcaacacgaaaaagttatgttgatggacagataaataatgtcacaacaaatgctaatagcagggtattacgcgctggcgatacaatgacagggctattaactgccccgcaattcgcgagcacaggcgcggcttcccgtcccgaacacgtaccacggctcgaccaggtaattactaaagggactatcatagattttggatcttattaaggtgaaacatggctgatttagaaaaaattcaattcctacgtagcacagttgcggggaaaacacctactacaagtcagcttgcagatggtgaactggcgatcaacatggctgattatgccatttacacgaaaaatggttcttcgatcgttcagttagcgggtaaaggtatcccagaaacaaataccaaaaaattaacagttgatgggcctagtgctcttaatgataccgttaccgtagcggaaggtaaaactattactttcaccaacgagaatttaagtggtgaaataactcgtcatatcgtcggtaaatgtgccagcaatgatggatggtacatcggttccggtggtacaagcaataacggcattcttgaaatcggtactattgacgatggtactgaaacaatccagtttgtacaacgcggtgctggtaacgtagaagccagaaaattagtcttacttgatagctctggtaatactactcttcctggggatttaagattaactagcaagactgttaaaatttcgaatggaagcactcttacactagaaatgggtgtaggtgctaatgacgcttacattaaaaacttgagaggctctggcgttcttcaattaactaatgacggcaatctgacgttcagaaattcccaggtttattatgctatgagtggaagaggccctggtaaagatggtactcttctgactaatgtagaaaacgagcgccaacttaagcaagataatttccctatatctacaggcaccgaagctcggtggactaaagttgctcttttaaaagatcctggatcaaaccagagtcgcctgcaactgatggtgactaacggcggtaactatggttctacgcgtggatctatcgactttatcgattgtagcgctagaagcattcccgcaacattaacaagcgcaaacattagttcttatctgcaaattcgtcgaatcggcgatcctggaattgataacactaaccaaatgcgttatagtctggttcgtacctctgagggtttagaactgtggtttactcaacgcgcgtttattggtggtgttaaagttgctctgctgtctatcgctggttatactgagtattatctgcctaacggttacacaacttctgcaactgctccggaaggtttagttgagagtgtggctattcgtatctatgacgaaatgaataaacctaaccttgacaatggtactgatggtattctgtctattgctaaaggtggtacaggcgcaagtacagcggatgctgctcgtacaaacttaggggctgttgctcgtgctggcgataccatgaccggtaacttgactattaacgctaacttaaaagtcgaaaaccctaatggaacgatggttgatttaggttcagagaactcagacaagtacagcagattaacccttgctcgtaaagttggtagcggtgctaccgtagcaatgcttaaagttactcctgaaggacacgtgcaatttggttatcaagatgcagttgctactccagctcctagtaaatatattctagttaaatccagcggtcttgaggtagaaggggatttagtttttaatcagacctatcgcggcaccgaagaggcagttgatattactgataagactgttgaccttaatggtcttgtcattaaaggaaccgacccaggtactcgtcagatgtataaatgcttctcatctggtggtggttctaatatagctaataaacctacctctgatggcaactttgttcttgaagttttatctttgcgtaaaatttctgatactgattggacgtgtaagcagacctttactacaaagaacggcggcgttgaaggtacgtatgttcgctacggacaaaacggctcatggtctgcatggaaagaagttgttgctggcgtccaaccaattaatttaggtggtactggtgcaacttctgtagctgccgctcgtaataacctcggtgttggtgaatggcaatctgtggcatttggtgtattgaatgtcaacggcgttagtaatgcagacccggccatcacatttaaaaatggggctatggttcgtgaagcacaaggtggtagtctcggtgcgttaatcctgtcagcttctgcttctgctacagattcggctaaatatattgcttttcgacccttcggtgattcgtctggtactgagattagagtaaaagccaacgtgtacaacgagccttcgcttgaatggtcttatggcgctggcgttcgttcatccgctgtaggtgcttttgtgatttatgcaaaaacaggtcaggcactccatttaagaccaaacggtgataattctaaccaagccacagttattgaccaaaacggtaaaatgacagtcggtggtgagttcgaggcccagaactcgaaaatcacaggcaacttgagcgtttccgaagataacagaatgatcgttcttggcaaaaacaccgatattggtttagtcaagaaaagtggtatgccaggaaaaatggctattagtaaatctaactcgtttactatcatggtatcaacaaataccaacaaccaaattaatcctgctgatacgtttaatgatatattcaaagtagatgctgatggaaaccagactgtttacggaaatgcccagattaacagacagctaacagtttctagtgcagcgactgttaatggtgttattaatgctaacggcggtattattgttcctactaccaagtatgtacaaattgccgatgctcctacgcagaataaccaagccaccaacaagaaatatgttgatgataaggttgcttctgctattagtaatgctggcgacacgtatcttccgttagcaggtggtactgtaactgggcggttaacaattacaggcgatcagttaaaaactacatcactttgggttacgggagacgctgctgttaatggtgttttaactgttgatggaagggctagatttaatcaagagttcattgtatcaacttcggttaacgtccagaacactggtaacagtcatttggtcttccgtaaagctgatggtacagaaaaaggacttatttgggctgatgagcctggtagcgttagtataagagcaggtggtgtctctgggccaacgtggaatttctggaacagtggttcttgccaattcccaggtgctattagtaactttaatggtgttaatagtactactaattaccctggcggcggaagtggcgcgtatttaaataccgctggcttaacaagtagatttagtaatggtgcttatgtttccttatacttccaagaatatgtaggaaattatcaccaggctattcttaatgttaacggctatggtcgagatgacaatttctatttcagggctggcggcgacttcttctgtactcgcaacgggtcattcgataacgtagagattcgttctgaccgtagagctaaatctgatattaaagttattgaaaacgctttagaaaaggttgaaacattatctggtaatacttatgaacttcataacacttctggcggtactactcgttctgctgggttgattgctcaggaagttcaagaaatcttaccggaagcagttactcaagataatgaagaagatggcggtatgcttcgtctgaattataactcagtaattgcacttctcgttgaatctgttaaagagctttctgccgaagttaaaaatcttaaagcagaaattgaagaacttaaatctaaataatgcatggggcttcggccccatcttttaggagaaataactatggcagtaacagggccgtgggtcggaagttcagcaaaggctgaaactggtgagtcgtggatggctcaagctggggccaaattaagaatagggacaccgttttggatgtctaatatgattggacaaagcgtattccatttaattttcagaattaactatgcacagggttcttctggtgatccatctagatatagaggattctttaaaagagggttagcagtaaacataggagactctgcaaaccaaccgacgctgaatgcgttccctggtggagatgtgggttcattagtagctattacaaatatcaaaggcgacccttattgcctttctatttggaatggtcaagataggcgagttaaagtgtctatatttaatgcatccggtggagaccagtatgatgtttatttcagcggaactactatgagtgatggttggagaagatatagatgtgaaaacgctggcggtctcaatgggtattttgaggctagaatggataaccagtttggtgctttattagaatatgtttgataggtaaaccaacaaattcacctcataatattaaatagattaaaaggctacctgtatggtagccttttgttgtatcctaaatatacgtatagtaacctaagaagagtcttataaaaatggctgagagaaatcccgtagataaactagccttatttgaccgggtaatctcgtttgtgatgggtgtgaaaacatggaaacaattgctgataaaaataattctaataatggttatgtttcttatggtagtaacttggtacaaatggactgatatattcccgatgataaaaggtgcccttgtagtcgatacaagggctatcgaaatggaaagaactgaaaagtttaatcaatccgcgttggaacagttgagcatagttcatcttacttccaacgcggatttttcagcggtattggcattcagaccaaagaatataaactattttgttgacattgtagaatatcagggaaaattaccatcccagatcgatcctaaaaacctcggcggttatccgatcgataaaacatccgaagagtacacgaatcatataaatggcttgtattattcatccactaaagcaagttcctacctaccgacacgtgattttgtgccagtagcttatacttttagttgcccttattttaatcttgataactactattctggatcggttttgatggaatggtacgcaaagcggcctaatataccagatatgaagctaaacatcatatgtggacaggccgcgcgtattttaggtcgagtgaggtgattaacgtaatgctggtgttaaattgtgtgttcttccaatagcccgtttgattgctttaaagaagttcatcaccgggctatttttctcgtaaatatcccaaactttcaatttgtcccacggatccggaacataatcttcattccttgccgaaacccctaacgtaacccgcctgtatccagcgctgtcgtgataatacacgaagaatggcctacctattggcgcaaccttacaacctctcttagcggctctcatagcctcatcgaacgtcattgatacctccaaaaatttctatgcatgtttggtcgaattccgatagtttcactcaaaatgaatatcggatgatctagctcatcgtggttttcttcgtcaatgacgatatcccaatcagtagccttttgttcttctaccgtggcaatgaatacctggtttacttcacacttgcggtgtgtacgtctgatgattgtatccccttcacgaaacacaatcatatcagggttggtagtgcggtacgcggttttacccgcgcacacttcattaagcatatcttcgtatgtcattataaaacctttacacgttgaacgatggtttgtttaacgtctttgtattctccgtgctctttaacggttgctttgaaagtgatttcatcaccttcgtttgcaatgttattaccgaagtaaacaacaacattaccatcaacattaattttggtcatgaatctttctacagaagtgtagtaagaaacttgagtatatcccagtgaaatcactttctcaacggttccggtcatttccagacgctgtttgatttcaccgatgtggttagctttagaaatgcgttcctgacgctcttgttcccactgttcgcggatttcttcgcgtttggcgatataatccttctccagtgcaacacccatgcagtaggcgcacacagcgtcaaaaacagggctgtttttgttgtcttctttagacttgtcagcccaccaaagaacagtaaacattggcatttctgcaattacttcgcctttacgcttgccaatcggcatgatccctttttccagcagttccagtttttcagtatcgaacactgacagtttaccgcgacgttcgaacagatcgaaatctgcaaagccctggaataccattttgaaagtatcagtttcagttaaacgggctgaaacacggtcgaaatactcacgcgctttcgcttccgctttctccggatcggtagataagttgcagatatagttatcagaagtataaccgccacctctacgctcaacacgcaaggtgtacattgcatttttacgaccagaagaaatgaagtaagtggtagtaactacggttgcgttagtcatggtatttctccttaaagggtatctcgtttcgatatggctaatatagcaaaagcccctgaccgaagtcaagggctttttcatcattcattcgaatctttcattgttttatgaagatgaatatcaaaaattttccagtacgcctttccgcgaggataaatttttgctttgtcaatatcgttgttgcttccccatgtgttgtttgggccacgacatcgattttttatataatctgtatgccagaataagcgctgaaccgatgattccgtacctaatggatcttctttactgaacagaatttgtatactcataagaagaacccagtgcgaacaatcagatcgattttcttttctggttcaaacggtgatttgctatcgatgttacactgatagaacataccaacatacttttcaggaatgttagattcaagcgcccatttcaggttgtcatcggtattcggccccaacataaggttaacaacatcaacagcataatcctgctctttggtgttaccggaaccgtttacataatgcccgtgggctgttttgaggatctcaattacttcgctatcgtcggtttcgactttgtaaagcgttgtattttcaggaatttcttcaagaatgatcaaagcggttttcatcacacttacctttgtgtttctgtttacgttttgcttctttaaatgctcgcttgcgatcgcggtgagtagaagcgcggttaatccatgcatgtttcgctaccaaattattcatataagccccttaaagaaaaatatttaggggctttcgcccctgtatcaatccagcagtttgcggatcttgtctgcgatacgtccggcacgggttgcgcttgcagtatgatcgctttcttttgaagccagttccgccagcttacgctgatgttcttcttctgctgcttggcgatctgctgcaacctgtgcaacctgctcattatcgtgagcaatacgcgcttccagttcagacagggttttgtcgaaagttgctacgatttcatctacagaacgaattttattaaacagtttcataatttatctcaattggttagttttaatcagtatacatcaatacggctggaattcaaaatcataaatgtcattcagtgcgcggttccactcggtgtagttttcaccagcaccataacgcatttgaatagcactttcgaacgttgatccgttgaggttcgggaaaccgaacaggtttttgattttgtcatgtgctacatagtacaaagaagcactttccagcatcgcaaccatcgcagacggttcgtgttcgcggcgcttgatacgtaacagagtacgactagcaccagttttacggcgttgatttggtgctacgtagaaacggaatactacgcgccctgttttatcatcaactaccaggtaaaacccgttttctttcagatccacgccttcgaatttcttgaaggttccgcgtttcatgtcaccaattttaattgcatatttgtgaatgtcaagtcttgtcagaattcttttcatatttttttagataccagtttgcctaattttgtaatttcgcctgtttttacgttaacaaacaaggcgatgctcagaaatgggatgctaatcactacgctgatcaatgtaaacagaaaacgtatcacaaaaagaacagcacgttcaagatatcgttgcatccacgcgattcctaaacaactataccctactataaaggtggttgcaacataaaatgcaccaaatcctttacgaaatacgtaacctttcccggattctatccggtcgtcggcccacatttcacgggcagttttcagaatagattcaccactagcgcgagtttcgttagccgaaggcatgtttttaaatttcatgatagtctcctatgcgcccagaactctccgggcgcggttgtttag

SEQ ID NO: 61 - DNA, 176230 bp, unidentified
  source 1..176230: mol_type = genomic DNA
ttagtaatggctaaaaccatatgtaacatcaatcatgactttataacggcatacacgcatttttgcgttattgtaatccactgggatcgctaccacgtcagcaggatccacctttacctgaatgactctaccaacaccgcccccgtagtgtggaaggtatgatttagccgcaacgtgtaggccagtagaacaggtgcgcgttttatcttcgtctaccatgtttcgaggcatggagacagtcacaccaggactattatcaaatttgccagtagcgagatctttatagttatcgcgcacacgtttccaggcaaggaaacaaccatcatcggtcagttcaatgtcattatgtacaaggaacccataaagctggtatacagcatcgcgtgaagggtttcgcatcaaccgttcaaagaagttcaccagatgttcatacggacgatcgttatacatttcgcgaatgattcgttgagtgatatcagaatcaaacactacatctttatatagaagctgatgaccaatgattttaatgttgcctttgctataggttcggatcgcttcttgagtatccaaacaagttacagcacctttgacatcaccagctttcagcatttcatgcgctttcttaaagttcggatgtgtttcacccgccatgaaaacgcgcccttcgtatacaaccgtaatgaacgattcagatccgatcatacgcggtacagtgtctgatactttaggcttttgttttacatcccttttcttagggaattccgctaacttgcggttgataacgcgcccaatggttcgggcgcttacgttgaactgttgggccagtgctgttttacttgcccccgtcaaccatccattatagatagctttctgttgtacttcgtcgagaattttgaccattatttccaccgtattaatttcttaaactcactgagattcttttcgttgttgtaaatcggacgaattgaataagaatcgctatgttcaacaagtgaagccagtaacgggtttagtgatttaaagatttcccatgcctgatcaacacgttttttcatattgctgcgtttaacgcgcattgatgctacggattcacgcagaatcggacaacgcaccctggaaagatttttaccatctttctcatacccttccagacacactatacgttcgagggtatcaacaatcttatacagtttttcattatatcggtttttcacaatccgatcaagcgatacaccgaaacggctatgcaatgcgtctgtttctgttgagtgatccttcccaatccatccaggcaagcaattatctttcaatgccttttcagatttaacatactgcttgcacagcatatcatcaaagcataccagatttgaatccgggatccacttccagaggctgttacgtatagcaaacacaacagggatcccagtatggcgcatgatacgcgataaagtagattctttcattgctgaatccatagacaacccggaattttcaccatctaagcggctatattcatcaataccatacaaccgaacacctggggctttatccagtgataaaaactctgattttatcataaacagagaagtttttgccagattgccgttactatccaactcataacgatatacggtcggggtttttgggcgcggttctgaatttttcggtgcatatagcgcttttgatttttcgcgatctgcatcatagatctctttttcttttgtcatttcactggtacggagatacacaatttccgattcatcaaaatgacctttccgaacgatatcattaacaatctcacgctttgaatcactatcgtaatatgcaacaaagctaacacggcttaggttatgcattttagcatacccgacgatatacggtttaaccgtgttggtatccacttttaacagaatgagtttcttctgtttccacggataataaatgcgtgtgatgtcctggcgtttggttgtttctggcttatacttgctccagcggcctccgctaccagttacctgataccatgcatctttaccgtcgtattcgttcgcccaatacccagcaacataatcatcattatatttgtttggtttgactagttcgctatggatccagccaatagaatcaccattgatgcgaaaattagcatctttaccaacaaagttttgtaccattgaaggcagagaatggaaccacgtcagtttatcacgcacggtttgtaacttatcgaattctgatttaactcgattgaaatatacccggctgatttgtttcagacgttctttaacaatccctactgtcattttatccatactcaactcttcgcgagaaggcatgaaatcaagttcaccgatcgggaagtcaataatatacgtatactggctttctgtatagcaatagaacatcgaggtatcatacaaatctttatccagaggataaatgatgttacccatgcgagcatatacaccgctagtgtatgctgatttatgacggatcaccccgctatcgttggttgcttctttcggctgatagttgattttgagaatagaagcaccaacaaagttaggacgaatatcagtaaatgattcgtatacccttgctgcttcgttttcccattctttgatatcttcaaccttaaccggaacagtgatagtaaccccgttaggttcatcgctttcaatctcatacagaggatcgcagaaaggttccccatcatccatatagattgtgtaaccgcatttgataccgtcttttacggattccaccgtgaaagcatcggaatagcaaagcggagatttgcaacccagacccatagaaccgatcaggtcgtttgaatcatttttagttgattcgaagtaaacggtaaacgcatcactaacgaaatcaggagacataccgatcccgtagtcacgaataacaaaacgaggatcaacagcagttggcaactggacatcaaacgggttctgatttcccgcttctttgtgtccatcgatcgcattacaagacagttcgcgaatgattgcgcggatcttgtatttgtatactgtcgaagaaaggatcttatacgctttcttgtttgcgcgtagagatagtttgtttcgtcccttgctggtatctgtaccaacacggtagatggtttgcggtgtatcttcgcgtaatttcattgtttatttctcacttaacattaaaaataacttggtcacaagagtacttcgttggctttttgttcagaccatattctactacttcgcaataagtgtcaaggaattttaccaatttttcttcctcgacctgctgtttcttcatatcaaggataccccacacgatagccccgataatgatagaaaagaacgcacaaaaaccgaatatggtcagatattttcccaatctaggcgcattataacgtgtcataccttacccctctttgcgaatgtatgcaagttcttcatgggttactggacggatatacagacggccttttgtatatgccttgcgcccgctgatccaaatgtttttcatatccttaacaccgttcatcacatcgttgtaaaacttcttatcagctttagcctgatagacttcacggccttgataatctttcatgaacaaacaataaaggatctcattcttatcaactagattagcatcctttgtagttgttttacttggtgaaggtttcgcacccaggcgcaaggccatagcttgccacactttaccatgttcataaccgcgcccgacaagagcatgagcgatttcgtgtaaaagagtgtctaaaatatcctcgtagatatcttccgcaacatgacgaccagacagttcgatcagttttttagcatagctgcaacggcccagagtttttgtaatacgtccattgatccggaatgtccaaccattactaatcaaaccgtgtttttccatcatggtacgcgcccagtgggttacttccattgcactacgagttttcaacattttagaatctcctttgcttggtacaaaaccaatatagcaaaaagccccctgcattgcaagaggctttgtaattatttcaacttcttagaaagttcttttaaatcattgagatactcaattttaggggttgtttcttcccagtatttcaactgtttacgcaactcttcggcttcatcttccagctttttgctttcgtccgtggttagatggtagatgttcatagccactaacatttcggcatgattctcgcaacctatccacgtagacacaaatttaaccgcttcgctgcgactaaggccacgcagagaatcaggagattctaccatttgagcaataaacgcaacctttgccagtgctttatctaacgcttccttagtctcctggatacgcttattgatgcgctgttgatatacattcatacggatatcaacaaaatcctttagaagcgtttcagggcgttcgtatgagtatagtttaccctcaaagataacgttaatgtttgggtttgagttttcaatcaaaccgaaatctttcaggatcttttcacgggttaacccattagcatactctcgcttgagcgttacttcataccgaaaatcttctttcgatagatccttgtagctaacgataacgcctttttcttccagcttgtcaaggattgcaatgtatttcacacggtcatatttcactgggatctcagtgatcaccaatttggttttaccttgcaattcataggtgccgtaaatcgtaccgtctgtgatttcacctttaaagtaaggatatttcagatccagtgtgaaatctttatcattcagatatgcaatacacccgttaacaactgatttaggatcatgaggcggaatgtttgttgcatatgcttttgcaatcccgctaaacccgttaaccagtaccatcggaatgatcgggagatagtacgctggcggtacatgttccggatcttcatgaactggcgttaaatcaccatccatataaattgctttgaatattggcgatagtttacacttgatgtaacgaggtgcgccaggtttcttaaccaaacgggaaccaaagaacccatcacggtcgaataacggaatgttattgcaccagtgcgccgccataagggataacgcttcttctacagaggtttccccgtggtgatacccatacatagcaacaccgccagcgatagaagctactttctgaaatcccgttccgccctgcatagcagagtgaataaagaaacggtgaacgggtttaaacccgtctaccaggtgcgggatcgcacgtgaataaatcgtgtaaagggcaaacgttagcccttccacctgtacaacatctttaatacttctttccattagtcaaccttagaaaatttgtgttttccattaacccaatctttacgcggatcagattcgtcgccgaagcatagttctaacacttctttgtattcgtcgtcaagtacaatgacatcatacttcaactgatcacccagaacacggtcgtaatcttctttgcgtaaagaacccagccccttgatatatcgtacatcttttgctttatcgcggaacggtgcaaactcatcaagagaatagaaccatttttcctcgcgcccaactttagcgataacgatcggggttcgaatatatcggatccgtttctcagtgaacaaagaaggccaacggctaaagaatgcaagcaacagagttaaaatgtcaccaccgtcaacgtcagcatcgaccatgatgccgatattatcataagtcattccggaagtatcaccaggatgaatattgaggatagccattagctcaaacagttctttgtttttgataatgtctgtaaaactcataccccatgtattcagaggcttaccacgtagcgggaaagcgccttgtgtttcttcgttacggcattcgatgaactgaccaacagcggaatcaccttctgtcagaaacaatgttgtttctacccctggagtatcgataccggaagccggaacgtgtttagcaatctttgcctttttcgctttctttttcgctttggtgatcgcggcggcttctgctgcttgtttacgaatcaatgcggattcaatgatcggagtaatgatttctggagtatccataatcatttttgcgatctttttgtaattcaaattcgcatgattgttaaactcacctgctgtatttgccaatcgctcttttgtttggctatcgaatgcaggtgcattaaagttatgcaggaataccacaagagttaagcattcttttacacgtgctttcgggatctcgatactatgctttttcttgatcatcggttcaagttcagaatagataccatcgatcatacactcaacatgaacaccgccatttttcgtatccagaccgttaacaaaggatttctgtttaaacccgtcctcagtgctcgccagaatgaagctgaggcgattatttgtctggacaatggttttatccccatacatggaagcgtacagcgggaagcgattagagagcgtttcgccgttatatgtgaatttcacggacgggaaagcaacggcaagggccattaagcgatccttaatcacttctttggtttcttcatcgataccagttacaccaaacatagagaagtctggagtaaacttaacagtagtaccctgttctttactggggctggttcggtaatcgatgttctgtgcgccgtccgtacagttaatggttactttgcgtttcccgtttgcagtctcgccaataaaaatcgagctataacagtttgtcaggaaagaaccaacaccattcatacccatcgttacgcggtttttatcatcgaagttagaacccgattttgccatagtccatgccgcaactggtttaggaactattttcccatctggggtttttacatcatcctggggaataccgcgcccgttatcagagattttaaccagattatgatcaatggttacatcaatcttattagcatgtttgaattcagttcggatcgcttcatcaatcgagttatcaaggatttcgttgatgattttaaccaacccttccacgtactcaaccttgcgatattggcccattatgaaacgttcatgcgcttctttgttaaccgatccgacgtacatatttggacgcaaccgaatatgatcgcgatcgctcatacaaaatgattcgtcaacctttgcgccttttttggctggttgtggtttctgttctggttcatcatctgccagaagaaaatctaaactcatattcacctctttgtttaatcactgacattatatagggttctatgaaaaagaaaacccctttcggggtttacttgttataagggaaaccatcacgaaccatttgaggtttatcaaccgttcgttttgcttcgcctccgcaatcacaatctttcggtgcatcacgggtagcaatgcttgccatttttggaaattctttattacacttggtgcatttataggtataggtaggcattaataaatctcttttaaactcaacatcttaactaaacgggctttgtctatgtcaaaaacacattgacgtgcgcccggatacaacttttcaacttcgtataccatgcagacgaaaccaacattgtgcatgtactcgcgttcatatgcattgaaccaacgagaaaggcgctgtattgactgaaacccaaaatataacccagccgcttgaaagtctatgttatctttttcaaggttgcgcatcaatcgattatcgtcatccggcgctggatgtcggtgatcatccatatcaatatagatatcaggattcatacagaattgatcaagccattcagcggtatccatcgacaaataacgattgacatatgggccactttttgtttgccatttttctgtacaatcattccagaaagaacaagaaaattccacacgatatacgaacatgatataatcctcacaagtaaactcaaggtttacaagtacgataccacttatctaatttttctgcaagcatttcgttgataatttttgcaatttcgtaccgtccgtgagtagtacccagttccaggtaaatcacatcaagtgcgcacacaatcgcatcaatactttcttcaacgatattaccgccgcgttgaggctgaatgagacattcgctgatctcgccaacttccgctgataggtgatgaaccacatcactcttcgtgcgtttcttcactttatgtgcaatttcgaaaaacttatcaagtacgatcgtcgtttcttctcgcgttgcggtattctcggatgttgaagccgtgtgttgaacaacatatttcgtaaaatagccttcaaacacgttgaaagggatcacatgaggaacaccattcaaaaacaccccttctttacaaacataatggatttggcgcggaatagacaaaccgccgctgcgttccaaatgccgtttaacgcttgctacaaaatcaaattctttcccgtatccatccaatctactgttataagtgagtagaccaaaagtaggaacatatagatcattttctttatacagattcatttacaatacctttatggtagccaaaaatataacaatcaatcgaaggacgttcaccagggaagtgaatgcattgcatgatgcgttcagccattagatcttctcccatgtataccgaagtagtttcttcgttgtaatgggtatcatacgacgttttaagcgtcatgcccggaagccctgcaatgtgcatgaatttagaattggtgcaaggttttcctacttcaccgttaaccatcaacactgcattagttttacgtgcttttctcatttgaatttcaccccgatttgagatacgttccattcttttacgtcatcaacaatatcataatggttgatgtatggtaaagcaatttttaaattactcgcgtcttgaatgttgcgtaagaaacgagtaggagaaagaagacacaacctctcggatccgttgtttcctttagcggcaaatgatagggtttctcccccgtcaatcttcatatcaacagaaatcgttttgaattctggtgcgtatgacgtgattttgccgttgtctctcggtgtactatagaaacatacactttgtgggacattataacggtctgtttcaatgtacatgtaatcgccgtcagacattccccacacggtgtagagggatccggtatagtcaccaaaggaatttttaaaatcttccttcgtggtgtatcccagagagcgcaattgcataagctggttatgctgttcgattgcatcggctttttgttgttcctgtacttgcgcatcaatcgtttcttgccaggaattatacgcatagtaacccacaacagcgattacagccataacccctacagctttccagattttagagtcttcgtttttgttactcatgctatattccttttaagaaaaagggccgaagcccctttgttaacgaagataaaccacataaccgctttggtcaatcgcgcggtctgcgtcattgaagatattaccacgaatgccttttgctggtgctttccagcttgcaggtttcaggatattaccatcattatcgatgaaagcggcaacagaacgctgattgaacatttcaccagtttctttgttgcgagtatcctgaacaacgcgatgatatttgcggcctttctccagaaagaaaacagtttcgaaaggagaatcttggaaacgagcgttacgcgctttgtacattgcttccatgaaaggggctgctttttctgcgaggatttcgaaagtgttcatggtatatctcctaaagtgtgtttcgtttcgatgtaagtactatatcaaagatggttattctatgcaaggcttttttcgttatccatcaaatattttaagtgttcttttaatgcagggagttcgttcaaatggcgttgcttaactttcttgtactctttgcgttcccagttttcaagattgcttgccaacgcttcatcacaataagcgatcccgcgttctgcatcctgaactttccgtttccattgtgcaactgcttgttgataaagagaaccgttaaccatcataataatttcctcccttgtttcgatggggtaactataccaaagctaccccagaatgttttaacaaaaagtgctattagtaggtatccagtttatacattttgcaccagttcatgaattcttcgaaagtctgagtattaacacgtttttccttcttcactttcttagtgattacaggacggttagtaaaacgtttttgcattttcacagtgattgctactttatcgcccaggtcttcaaccttttcaaccagcgcccactgagaaccaatttcagcgccgaaagtcaaaccaacaatctcacctgctttaacgtgtgctgcatattttactttaaccattttcgtattcctttctctgtttcgtttcgatgaatacaagataccaaaaagcctcccgcaatgcaagaggcttctttaacaaaaaatgctattttatttctttgagtaatttacggatcccgccgccctgtgtcttatcaaagattttctttgcatcaataacagaagtgattatgtggtagttgttaccttttccgtcaaactcaaactcgaccttgtagtcactacgaaatttcacaaaaacaaattcacctgcaaagtgcttacggaactgtttttcgttaatgtccaaccattcctgtgtatcatctaactgatacatgcgacaaaacaggatcgaacccattacaacaatcatgacaaggatagctaacgcgaattctgacatcatttacccctgtttactgattgacggtgtaacgatttaggcacaaccggatttcgatacggtttgactttatggatcatgggttcttcctcaaccaaattaggaaattggttgttccattccatcgaaaacggataaggttgtgacttgaactcttcgatcacacagtttactaaacggtcgccgattacacccaaagccgccccaataatcgctatacgcataaatcaccccttaattgtgtcaagtacagtaaaccagtcatgaagccatatcgttgttcttaccgcgatatacgttaacaaactaatcaatgataccgctccgcaaatagccagcgtaatcaacagccggatttcaaatttagtaaaattcatatcaatctcctttcttagaacccaatataacaaaagccctcaaccgaagtcaagggctttgttttaaatttttaccagttttggtaatcgaagaactataccaggatggatcagacgtgcatccggaatagcatcacggttgattttagcgatatcaggccaaagttcaccaacaccatacagtttctttgctatagaatataggctatcgcctggttgcacgacatagcgatcagattcaatcttaaccagatcctggttaatgatatcatcaaaggcttttgctttcgcttcgttaatcgtgttcccgtagtaatggcgatccataatagttaatgtgatcatcgtttctttcctatgctgttttcgtctgtctcttctaaggatggaggttcttccagccccagggcataacgtttagcatagattagcatcaatgcatctttagcgcaatcatgaatcgaatcatgctgaatgaatccatctaacatgcctttacgcagtggacacgtggtcactccgcgagtcagtaaacggttttcaatagctgtacgcacatcacggctattccagaacacggtcggcatatcttcaaacgtgtcaagtttccctgtcatagttcgtacaacatcggttagcatagaacgatcgaattcagggccgcgcgtataatcgtatgactgccaacgactcacaccgtcagccgctaaatcagcaaagaattgtcgatgaccttcgtacaaatccatgtcgatatcggaagggaacaaaaccctttgcgcttctttagattgctgtttccaccattcgatcgttttttcatctttgatgcgttctggttgtttccggatgtcaaatttgtactttcttcctttagcaatcagttcctgaaaggtaggcggatcataaggatcatcaacaaaaggaacatagctaagttcagctagttttccttttggaaacgggccaatactttcataatcaaatacgaaatctacgggtaaatgactcattcgcgaccccgcttatacgattccatgaaataggccaatgatagcgcgacttccggagtaacatcaacggattcgatcatgcctggagttaccgccatcataccgaactgacgaagcccacaacgagcaatcgatttttccagtcggatcatgttttctacagcctctgcaaaattgtccagatgttcccaatcgtggtaatcttccattgtagaccgatcacttttcaaaatcagatcggcaactaattcagcataaaggcgcggaaggtgaatattcatttaaaatccctcaagcatgtgtttgttttcacgaatgttacgacccattttcaaagtatcaatgatcactgcatactcttcaaaagtgaattcgatatcttgtgaaatgtttccccacgtgtaggtcggcccgttaggacagtataacccaacttctttgtttgcgttgacaacgcagcgcaattttgcaaacaacaaattgatatcgatagaattgaacccttcgagataatcaagcccctctctaccaatacggtcaacttctcgcaaaatcttttctacatctttgactttaacaataatttttataataacctcaaagggccgaagcccttagacataatcaacagtgaatcgtgcgcgggtagttcctacataaagcaactgcttacacaattcataatcggcgtatgcgtatgcatcgcgcgtatacatgtatgaatgatcatacgtgcttccctggcctttgtgatacgtacaaaccggaagtgccttaaccgtctggaacttgtttttgatttgccagaacgaataccagggggctttgtatccagtttcctgtttcatcttcttatactgaaacgcgacgtagttcaaataatcgcctaaacgttcctgcataaccggatccgcaataacctgaatatccgctttcgtatcctcgaacatcgattctgttttcatcaagaaataatcgatttgtaccggatcgcatcggtcagctttgatagtatcagaacgcggtatgatttcaaggattttaatttgctcgttgttgttatagataacttcaacaaacgaaaccccattcacacggccttctgtcactaacggttcttgcatcacaaccacttcaccaacaatgaacggctgatcagttttgtacaagtgtttgcggatcactgcgtttaacttgtctacgtttgcgttagtgtaagcaaacatacggttattattcaggtcatccggagtcttaacacggctaaaataacgtctcaggaagtcactagcgttttcgtgcttcattacccctagttcaccattcatgaggggcattaacggcttaccgtcgcgtatagcgcgtgatacctggatgattgggtttccttctgcctgacgcataatcttatccatgcgaatgacatcaaaaatttcctcatcaaagaacggtgaaagctcggtgatcccttctgtattaaccggacggatctgatccttatcacccaatcccaggatcaccgcacaactcggaatagtacgcttgatgatacggaatagttctttgtcaaccatcgatacttcttcaaccacaaacacacgacattcagacagatcagcggcttttttgcctttttgctgttcaaatactcgtaactcttcgttggttacggggctgattttcagtgctgagtgaatggtcgttgcatccatacccaccgcctcagagagaacgtttttagcctggtgcgtcggtgctgtcaaccagatcccactaatacccagttttttcaatgtttcaaacacaaattttaccagagtagttttaccaacacccggcccacctgtgatagtagtatggattttgtttctgatatttttaatcactcgatcatgtgcatttttctggtcttcgctcagatcgtcaaaagttaattcgctcatactttaatcaataccccttgaatacttgcgtgttcaataaaccaacgcatatctttctttttcttttcggttacggtttcaacttcttcctttcgaaagaatcggctaagaccactttgtttaactggattcatcttatcatgatattctttgataatcgaatttttatactcgttagcatcgtccggagatagaaacaacaaaggtgttaactctccttccttaatgaagggaattttaaacccgtctttatccttactaacgacgatataatattttgtaatcattctcgcccctcataacaaacgtagaatattccaacaaaccaaaacactgatagtataatcagtaaaagttttctttcaacgccatttacgtgaaacacacaccaaccgaaaagatatgtgatcatcgcgcaaacaccataagaaagaaccccaacagctactagcgcgatgatcggatccattagtagttgttagcccaacggcggaggttttcggcttgtttaagagcgtacatcttataaattgtttctgcatccatacccaatgcaataaacttacatagtacaaagtggaattggtcgatcatttcaaacagaacttctaaacgatcctcttcactcagatccgcaaatttagtattgcgcaattcctggtgatttgctttccacggtttccaaacaccggatgcaggtttaacaccgcgagacattccacccagagcggtgtaaagttcgcgggtttcgtctgcgatcgcgtcatcttgcagtttcagccaatcaaggatttctccgcaagtttccagattatctggacgcggaacccaatgcagcgtatcagacaggatttgttgtgcatggttttgtaaatccagcatggattgtaaaggatcgccattacgggccagaaccttttgatattcggaatctacaaattccagatcttccgggttaaccaggtgcgcacatgaattaaatacaggagttttatcagtagtcatatcaatctcattttttcggtgatttgtcccacgacttaaatcgaagttttgccgtgagtccagaaacagtattatctttcaaatactgcataatttcaagtttagttgcgccgtccgtttttatcatttcgttgatatctttggaaggccacgggcatttatcccacattacaaccttttctccagcctcaatcaatttaaagaggcggtgagtagtatccggatgacgtgcttcattgtcaagaacccagacacgcatatttttgtacggaacctcagaaagcgcaagctgtccaccagtgatagcgccagcattatcaacaaataggctatctaatggcccctcaagaagataaaccgtttttaacggatctatcgtatcctgtccgtaaatcttggttgattcctcacaggctttgattgtgatatatttcgactttgcaccgtcacgtaaagcacggccctggaaagattctattttacctttcttatcgaagatagggatcactaatctcggttctggttttgcgatcggataggtatccggattcaccgtattaaccagttgttgccattcgcgagtaaaccacaaccgatcccacttgtcacgggggatacaacgattctgcacatattttatgatcggatgttcatccggcaaggtatctaacctttcgcagaattgaagagtaggaataaatttcttctcttccttcggttgttctgtatgcgttggctttaacgaattgcgatccttaaacgattccatgagataatcacggtaatcgtctggataatattctttcaggaatacgctaaacggtacaccataaccacagttaaaacaaccacaattcatatgatcaccctttttagaagggtagatccaaaatcgttttttgtacttgtctttcattgagtcgccgcaaataggacaacgcgcattgatgcttaatgcccccgatttacgaacgatttcgctttgaggcaatgatcccatgattcgggttgcaaattctatatcaagatacatttcttacctcagttgactatctttagatcctcgtcgattataccccgcgctgatcatttcgtcatgttctttttggcattcaatacaataacggcaacccttcacgatagccctacgtttttcgggtatcggatccccacaatcaaaacaatgcgttaatgattctccgtttctgatttgagaacgtgcaaaatctatcgcattgtctattgttgcctgaatggtatcttgaacaccgtcagcagggccaaatccaaccgccattgtaaatcctcctaatcaaatgatttcaatatcatagactaagaggatttttctgtcaagaacttacttgcttttctgttccgtcaagcattaacttccaaccacgaaacgcctgtttaaacgaataatttattgcaatatcaattttatcagaaccttttcgacgattctgataaacggtcgcgttgtcactcatatacatgatacaaattggaaaccatgtataatcgttagcagtagcccagatagtgatattcagcggaggaattatcatttctttttccttttccctgcacgggtaacgcccaatactttcggcccgatgttggttactgctccagtagtcacaccagaagcaatcttttctgtatcgccgccagaatcacccgcgaccatatcctctaacatgcgccccttatcataatattctttgaggcgtggaacgttcaacatgatttcttcatgctcttgttctgtcagattgtagcgattgcgtagggtatcatatgaactggttaagttcataaacccactcatatacggaacagcattcattctacgcttgatatggcgtactgaacgatgaaaaggagaatacgcttctaactcttcttttgttttggggttgcgaattacttcgccttgtccatcaaggatccccagtttataagcagaccactctgtgaatggttttttgagtagccggatcatccggacgctatatgttaaatccatatttttaactaattgatcactcatgattattactctattgtgaaagtgaataaatcagatttggtttcaggttcaaactccatacaaacaacctcgcatagtggtttaacccctttccaatcctccaggtaatacccagtatctataccgcatccaggattcataacaaggccagtttcatcaagaaactttttgcatttacttgatgtggtgctgtcatcttgtcggaaacagtgtgttttcgaataccggaaatttgcagacatttgagggattatgaaagttccctgacgcgcgatctgtgatgcacgttcgattactttatactcaaattctgcccctgtatacttacccttaaaatcagaggttttgattttaccaaaaggcgggttactgatcgccatatcaaacacctgattaaattcagttgttaaggcgtctccatgcacccaggaggcttctggtacgatacgcttacctaactcatagtatgtgtgatttaactcaacacagacgatttcgcgcggcgtattgtacatcatgtaatgaaccatagcgaaagataacccaccgataccagcacacaggtcaataacacttccacctgtgcaagcatcgattgtgaaatcgcgagcaagtccaataggggtaaagaacgcccctaattcagaattgtttgtaaacgcgccttcatgaaagttttcaataatgaacaacttctcttcgtaagttagcgcaccagatccattatctgattgtgtttcttagtctcttgctttgtcaattttgccattaacatcaccaaaattcaattttgcaaaatctccatgaagttctttagcttttgcatcgtacaacaatgcagcaccttccatagtatcagaaagacctatatacatctgttttccgtttgaacggatatcagcgcggaatttatttccatgtctttgtacgccgatataaggaatatctttccttttagaaacctttcgatttcttgaattttctggaagagtacattccctaagattgtctattccatttccagcttcaataccttttatgtgatcgacatactcaggaagtataccataatggatataataaacaattctatgaacaagatattgcttccttttatatgttacaacatgatacccatctgcgtttttatgtccagcaacattcccttttcttgctcgttgtcccacatctgcgttccataaaacatcaccagtgaagacattaacacacagaagaggtaataactcaattattccttctagttcttccttaatggtgcgttttgtcatttcaaaccctctttaacaccctctttcatagctttccaggtagaacctgcttcaccattcagggcggcaaatacaaataataagatagcaaggacaagattcacgccagcaatcaccatgattttgctatacacgaaaatgtaaggcattgccaccacccaccaactaaaagaattaccagttacgatgttgagtgctgcaagtaagaaagtgataacgaatgcgattttcataatgtcctcctttgttatgattaaggtatcatcttttttgaaagaatgcaatacctatagatacaaaaagccccgaaaggggcttaattttttatgcgttattgatgagataccgaagaacgtttttcgcttgttcctcattacaaccaactttgaaaccaggttcgatagggaggaagttccagaggaaatcaacacttccttcaacgtcatctttgcctttttccagcatcgctaacagcaaacctttgtttttgatgctgtttacgattgcgtcaaaataaccatcgctgaaatcaacattcgggttcagcatttcgttgtaagggttgttgaatacgttcattttgaatctcctttgtttaactcagtatcttgtctacgtgagttatattaccacaatggagattcaggtcaatacctttttacgattttttgaaaagtttttcgtatttggcttttacccagcgatacatatcttcggccttgtcactggcaagcagtgagaacagcagatagatcgcagcacccaccaacacaacgcctactacaatgtagacgggtaagagaactgggaagagaacccagaaccatgacatttgcgagaagccaaacactttagcggctgcaaaaatcagagttagtccagtcagcagtttgatagccggaataggaatcgttatagtcttagtcatttcattaccttacattctttatggggctattcgccccagtcaattaaaattgaatgtcagattttgcaatctgtgtcattttatcacgtcgggtagattcagcctgtttaatcatcgggccttgtgtctgttctactgttttaggcatagtgttgccgtggtagtcagatttaaacccgtattcgctgttgtcggtatccatccagcgctgattaccctttcgaacttccaacttgaacttgttgaaagtgttcttatcgccataacgggatttgatttgcttgaacagttgcataccctgatcagctaactcttccgtctcgattacagctaacataaaatcagccgtagcaggtaaaccagcggattccgcaacatcacccatactcacatccgaactatcccatgcagaacgcccaacctgtgcgcctgtccacattacggtattagtttcaacagcaagaccgcgtagttcttcggcaattgctttaaccagaatataggtattctcagcacctttaacacgggttgaagtacagatccccaggtaatcgacaatgatcacatccggaacaaactgtttcttcaatttaagctctttcacaagcgctctaaagtggtttgcacctgcacccgatgtagggtactgcttgaccaccaaacgcccaaccttacccgctttaaggcgctccattttgttcttatagtctgcgtatgtaatgttaccttcgtcgatgtcatccatagtcacatcaagaaggttagcatcgatacgcttagagcaaacatgctctgccatttccatagaaatgtaaagaacgtttttaccctgttgcagataatcagccgcaagagaacataaacccagtgatttaccaacgttaacaccagccatgatgatattcagtgtaccacgttccgcgccgcctttggtgattgcgttcaggatcgggataccaaacggaattttcatcgccttcgattggtaaagcatccaccgtttttcataatcttcgaaatagtcatgacctaccgaactatcgaatgaaattgctaatgcttcctccatgatttcagggatagccccaacaccaggaagtttcttgttctgttctgccagtggtttttctgcgttcgcctggatttcgattgcacgagaaagagcacgatacattgctttatctttgcaatatgtttccgtttccttcattagccaatctaaatcttctggcgcatttttcagcgactgaatcgcctttttcgtgtcttcgtagactacatcacttagatttcgtttgtcaagcgcaacctctaaagcagtttttgacggaatgccgttgaattcctgtacatgtttatcaatgaggtcaaacaaaacttgcgcattgccttcgaaatattcctttttcagatggggccatgcttggacaaaatatgtcccgttataaatcaggttagaaaatattgtatcaacgatcattgtattgccttataccaggttactgaacatcatgaaaaagttgtaaaccttttgtttgaatacatcccataatgtcagtttaggctttgggacaactgaacccttttcaagctctttaatctgtgcataaattgcatcatgcaccagcgggatcaacgcttctttgtcttcgtctggggtactaaattctactttcagaccatgatcccaaaacaccttatgaatataaaccagatgcgcaacacctttttcatcgttaatcagaagttcctgaataacatctttcatcgcttcatcaatataattctttgctttgctctcgatatccatacattgcctcggttatggggccgaagccccatagtttttataaaatttcgttgtcttcttcgatatcatcaaatgattctgggatatcgtcatcatccagatcaggatctgggatgctatcagtgctgtataaatcttccagcgcggaaccatcactgatttcacgatcagggatcttatacttttcttcgatagctttcaagaatggttgatgagtaaacagaggacgccagaattcaacgctatttgtttctgactcacgccatttcttttcttcaacttcgagttcgccagtctcggtattcaggaaagcacggttgcgccagcctttggttacggtctgtacaaagttcatttccattgccagatccagaaggccagaatacatactaataccgccttcataggtaacatgcagcgggaattttgatttctctttcacgaatcgagatttttcgatattcatgatgaaatcataacccaccacctcagtaccttctttcacctgttgtttacccaggatgatcgcagtatcagcggaatacattaaaccagtaccaccggaaataactttcttgctgtacatttcttgtgtgtcatatgtatgacagatacaaaccatcgggatatccaggtcagccagataaggcgtaaccatacggaacataccttttaatgcttttgctcgcgtcatatcctgtttatcgttatcagacagcgcgtcagcaagttcttttttacttgccgtgttgcctactgagtcaacgaatacaatcaccttatcaccgcgttcaagcgcgttaagctggcttacaacgtcattacgcaactgctcgaccgtcgtgatacgagtatacacaacacgatccggatcaacacccattgatttcagataggatttagtaacacctttttctgaatcgtagaacaggcacacagcatcttcatacgttttgagataagccgctacagtcagcaaacctaagttggatttgaagtgtttggacgggccagcgaaaagggtaagaccagaagttaggccaccgttaaacgcaccggacaacgccagattcagaatcggcacacgggttcgcgtgatggtaatattgttgaatacgtcgctttcagaaagtacagatgcagtttggctattcgagtttttgatcagtttttttagtagtgctttgtttgacatttaatttttccgatttattcattgtcattctatatatctcactagttaatgaaaggggccgaagcccctagagtttaccagtcaccgaacagatcgtttaaactggcacgtttttcataatcaattttacatacttctgtgatgttagtcaatggactaataacatgtttttcaaacatacccggataatctacccatgccagaatatcactttcgatctctgctggtagtctatttccagattgccacgcgatgcaatcagcttgccacgggtttttatcccttaatggtagaaccattaccttttcaccttccatgattggtgtaacaccatcaataccagcagtgaaacggttaaagaacaacacccctttaatatggtttggtgttcccttgattggatagccagccccatcacgatatttcgaaatgttgttggcagatgatacaccagcaatttccctgtagtcaagttccttatattcttcttcgaactttttataatgttcgtgtaaagataattcaccttcttgcaggatacggcggatcgcttctttcaggaatactttcacagaggtcggagtactcgaacgctgtgtttccatacccatgattttcaatttcggtttttcatagcgagttccttcggagtcccacacgttagccgcatatcgttttttagcagtccagaaacttcccaacccttcggaacccaacggaggcccagaaatgatttcacgatccataaacatcaggtgttccacgttgttcatgtattcgcaaagttcacgataccctttatcgatcattggttccattctttctttagcaaagcgatccaggaagtcaacccaatggttattatccttaaatttagcctcaccaccaacttttgcaatcacgttatccatacaaacataaatggagtcagtatcacagtatcgaacatatgcatgatccgtagtaccgcacaggtcgttaagatattcgtttaccttacgttcaatccactggatagccaactgcccgaacatggtgatcgcgctggcgtttcgtagatcgaagtatcggaagtgttcgttacccaacgcaccataaagggagttgatagaaatcttacggttaagctgtgctgtgttcgcttgtgcgatcttcttctcacatacgcgcttaactgctttaagcatttgttttgtaagagttttcagaactgctttcgattcatcactgaaatctgtatagaaatcaaagtcaggatcaatcatttggttatgcgcgtctgttaagtgttcgagttcgtgcttgatgagttcaagatttcgctcacccgccatcattcgttttttccacatcttacgctgatcaaatactttcttgatctctactgggatcacgcctttgatatcacggcggaacatccacccgttaggagaacagctaaattcatcgctagggcgcggcgcggtcttattaatatactcttcaagagcacgtaccgcaaaacttcccataatcgtttcagggcttatattcacctgtcggatgatggaagggtacaggcttgttaagtcaaacgataccatgtatttgtaaggcccaggaactggatccttcacaaatgccccagggtaaggggttttagtatggcgtctgttttccggaataacaaccttatcttcacgcagagagttataaatgatcgcgtcccacgttttcagcggagacataacccctgggaagttaatttttgcatagtacgctacagacagaaccagttcaataaagtttcgtttaccgtcgatatcaagtacgcggataacgtcaacaatgttgtacgtgatgtacagttggtgatcgcgctggcgtagttcagacagggaaccttcatactcaactttatttttaccagtttcgtattccgcgatcgcgtccaggcggtaagatggttgcggggtaaagctgaatttcttatacagcgccataccatccatttgagcaacgccggaaatatcatatcctaattgttcgttgccgtaagcgtcagtagtggttctggcggttactttaccaaatgggctaaaatgccttaccacgttttgaccgaaaatgttcaggtatcgcgtgatgatatatgcaatatcgaatttgtcagagttccatccggttacaataacaggggttcgctctttccaatctttgatatacgcagacaataacgacttctcggtctggaaagaccgataaacaattttgtttaaatcttcttcgctaatgtctttgcgatcaacgttttccgcgcaccattccgcaaggccaccctcaaccagatcgtatacatagaatttatcttcaatgctatcgtaatgggtaatcgcatcgattggatattttgcttcacgcggatccggaaattctggggcggtcacctcgatatcgatagaagcaatgcgaatgtgttcgcggttgtattcgatttcattccggtacatgtcagaaatgtaagccagtcgataatcgtccatacctagcgcttccatcccaacatcgcgcatacgctgcatccagtttttagcttctttgatgctgtcaaactgttttttgaggcaaggcttgccataaatgtctttgtatggggtttctacgccattcatagcgtgttgatacattacgggcgcatatttcgtcttacgtacctgttcggtgccgttagagtcaacgaagcgctcgtaaatggtatctcccatttgttcaactgataggtaaaattcattcattggatcttgtcttctccattaatataatgttccattgtaacaccacctacagcaaattcaagtttactcgatgttctaaaaccaacaacccttctgctaacaagtcacggatctttctcagttgaacaagctggcgttcaagtttaaacccgtcgaataacatgctaaaaatactggaattgatactatgatattttgcttctgcaatgccctgattaaccatcatgatagctttgttaaccagtagtttcctttccgttactgtatgttcatccagttgacaggttgcaagggaaaccagatcatcataagcacgttgatcaataacgttatccatacgggccgcgaaaattttattcatgtaagtgcggatcattgcgcgacctccattcttttcataaagacttcttttgcttgttggatcaagtccagagattttttaatacgctcatagaaatgagtggtttcaacttgattgcataacaatgtgtactctgaaatgttacgatcgtaaaatccaggaaagtagtgttgtgcatagctgtaagtgcgggtatctgacagattgcaagttaacgataacaagatgtcatcttttacaatcgggatgatcaaagtttcgttggatttgattgaatccatgatttcgttaatagtcataatatatccctctcaatggtgtacacccaatataacaaagcccctgcacgaatgcaagggctttttgattagtgaccgatccggtacttgtacttgaggatccaatctgctttttgcgagtgggtcagtacgcggaagttgttttcttctgcaaacttcaacccagtggttacgatcttaaccatgccccactcttcgagaagtcgcgcaatgttgttccggcgtagttcgtcttcttccgtcatatcgacttgacgaccatcaagtttcaacagttctttaaaatgcacgataaaatacttaccttgctttttcagaatgtggcacgattgccagagcattttctttttgttgttcgcaataccaatacgggttagcgtttcacggatctttaaaaaagaatcgtcgctgattagttgaatttctaacatacatcaccattgtttaatcaatttttccaatttcttttgttcagctttgtttttcacaatacccaacaaagacagagcgacctttgcgtgttttcttttccaatcctcgaacattccgaggtctttaagttcctgcaaatattccatcgctgtacgtgtatttacactgtatttttcgcgaaggatttcgataataattttctcttcaaaatcttccgatagtttagcccatgcaccgaagcgtttagccttcctaacagagttgagataatagttatagtgcatttggtcagagatactaccgcctaccagattcatcacataagcgttatatatcgtgtctatgtgctggctcattgcgttgtctacaaagtacttatcatacacttcatcgataaccaacggagttttaccgttgttgatttcgtctatgatgttaaacaaggtgttttctttatccttgccgtactctttgatcagttcttcaaccttatcccaatctttagaaagccaagcggattcatgcggggataactcttcttcatccagaaattccgccaggctcatgattacgcctcccagaccatagaaagcatcaggttcatcaacagatattgcagatgaatttctttattcatcgccagcccgtattgcgcgttgttttcgcccacaatctggatcagtgcgattttcgaatcctgattcacgatagggtaaatcgtatcagtcaattttccgataaaggtatcgtattctgacgcatatttaataacctcagagcgcaaccctttatagttcttttctttcagcagggtaatgatatgagacacatcagaaccaacgatctcattcaggatcccagcatcaatttcaccacgtttcgaatagaacccgatcgctttgataatagaacgcgcatccggataatgctctttaacaaacgctgcaatgactttaggatcatacttgatattctcgatttcaaggataccgaaacaacgcttgattaactgtttcatcagttcgatacgttcagcatcagacggaacaccgaatttaacaggaggacaacgagaaagcagagcactatgcacaccgttaatgttgttcgctgttacaataacagaaacgtttttactgtatgcttcgataaagctacgcaagtgtttctgtgcttccgccataccagaacgatcgaattcatcaatgatgataatctttccgcctggtttctgcgtcattgatgaagcaaaacgatccagttcattacgaatgaagtttacaccacagttcgaaccgttgacaaagaacacctcagcatcaacctcacgggccaacacaagcgcgagggtcgttttaccagtgccaggggaatcagatacaagggtcatgttctcaacacgcccagatttgattatgccccgcatagcggctttgtcaccagaaggtaaaatacactcttcaatcgttgttgggcgatagcgctgatcccatgcaaattcatcaggagatcgggagattttaccgtatttggtttcgatgatttcaatattttcactaagttccataatataccttcaaaataaatggtgtaaaagaaaggggccgtagccccttaaaactatcttacttgaatgtgctacttgcttcaagtacgacgacgtaagcaacgccgttatcagaagagaatttcgcggcccctttggaggaaatctctactttgtaatcgctgttgatgaactgcatgttatcaatcttcatatcaaaattgaaaacattgtcgccttcatactcaccgacttcaacagagaaagttgattgactttctttgcttttcgcggtgatgaccagtttaccatcaatcggttcaacggacaggtcggtcagtttcatcatgcgagacgctttgatcagtttttcgaaatcgttagccgtaatctggaaaatcagatctgctactggcatcaccagacgttttttcggtttcgggatcgttgttgcgtctgctgaacgttcgatgatcttcatcttgtcgccgcgaatcacgatttcaccagtggaaatatcatgagtgatttccgcgtcagtgccgacgatgttcagcatgttcaggaatgagttgagatcgtagataccaacatcttcatcaatcacatcagcaatttcagcttctgcgtatacaacgctgttgattgatttcgtcatgatgaatgaacctttggtcaacatgatcgaagagttgatttgagaaaagtttttcaggatatcaatagtttgtttagagaatttcatattcagcctttagttttcaataagtgttacttaataagtgattttacaacggtttccgctgctgtgtcaagcatatcagccatttctttaacggttgtacgcttcggatcttcgcggcgttcgctggtaagtttacgatgttccgcaaccactttttcatcaatgtcacgatagtgtttaaaacgttcctcttgaggcatagctttaaacagttcttttgtttcgtccgagagtttagcaacccaggatttacggacgcggttcatgtagtcaacaaaaacattactttcattcatatatttcttctctaacttagaattctttgagtgggggccgaagcccccgcttgtattacatgtctaacagtttatccaggtcgtcatcaccggagctattagaatcatccagatcgaacggtacgccgtcatcttcgcctaccggaaccgatgcaacaccaccagatgatttcacatcagatgtctgattgtcaaacttagccatttcattatcgaagttgctcagttcgctatcaaggtcagcggaagcgctggaaccagcagaaccgatcgaactacccataactttattgaagcgagtggtcaggtcagccagcggtttgaattcgctttcggcagtaatcggacggagatcgctcataccttcgaaaattgctttctgaacttcttcatcgtcgatgtttttgatcttagccggaacaccaaacgaactatcgtcatagttaggccaatcaccaacttttttcgctttcagggtgaagttagcaccatcaaacggacaggttacagcaatacccggttcatcaagttctggattaccgttaattgcggcggtgatcttgtccatgattttcttaccgaagcggtatttgaacaccttaccttcgttttctggagcgcctgggtctttaacgatcaggacgttagcccagaaactttgtttacgaccgatctggctcagtagcttatcttctggcccgtttttgttggctttagccttctcatacagatcgttttcggaaatgtacttacatgcaggacagccgtcataatcgccgtgggtagaggaacagttctcaatgtaccactggttgtttttcttgaaagagtggctcacgatacggacgaacgccagttcatcatcggaacgtgctgggaggaatcgaataacggcggaaccgtttttctgcgcgtccagggtcagtttccattctttctcatctttctggaagccggaaccacctttcagatttgctacctgtgcctggagtttagcgggatcttgacgtttaaaaatgctgctcatattctgttttctcgtttagtttagtttgattaacgtttgtttcattaagtttcgatattttatgatatctttttcagtaaggtcaaatatttttctgtatgcctttaacttaatgctaaagtcagaccaaataatatcatcagctacttgatcgtgtttatttatgatacctaaaaatgagtcaaaaatcaaaaacgattcgtaagatatcacatttgacaggacaagtttgcttatgtaggacgttgatgatttttcgctgtacttgaacaccagagacacggggatctctttcattttggcgaattcgtacacgtttttaacgtcatccacaaacacgttatctagtctttgtaactttcctatgtactgcctgtaaaagacaatactatcttcatcaacatcgcctacccagaaatccggattggctacgaagttggagaggaatataaaatagatttctttgaatgtaaagcgttgagctaattttacaaagaaatatctatcctttcgcttgttaaaggcgttttcactaactttgatctgccagttgtattgaaggacatcaaaacgcccctggaaatgagttttcatcgccagatataacttgtatacagacaaaggcacaagccgtgaattcgcctcactatcagcaaacggagctttaaatctcacatgaagccgtccagagtggttgatgaactatgttcaagcgcaaccgatgggcgaagcatgtttcctttgatcgcttcgtcgctaatcttatcaaggatcgcgcgaggaaccgttttattcagcatcgcataatcaatggaattttcatccatccattgtagcgttgcttccatgtatgttgccccctcagaggcaaccagattttcgatatacaaaccgacttcggtcttatttccgatcatgctttacgccttatcgatcatatcatacagttcgatcagttcgttgttttcttcttcgaaagcggtacgggcctgttcgtgatacagtttgaacagtttcccgaaggtttttccgtcgataccgaaatcagtttttgctttggatttaatatccttgaaagtaccgttgaagatctcaacttgagttttcacgttggatgcttctttgatcagttcttttacctgttttgctacatcagggtttgtttgtaaaaattctacactcattttgttacctcaaaaatcactcagtttttcgaacatacgggaaagtttgttatccatgaagtaacgttccattttggctttacttccggattttggagtattatacgcttcaataatcgaattttcaatatcttttggtataaattcgaaatcgcgtagttcctcattttctttgtaacgagcggcccattcaggggtcatcaacgttgtcgggtcgtctgcctccagccatgcctctaactcagaggattttaccgctggggcgcgttcgccttcaaccttcgtcacaatataatcatttctaattttaatacaagcgatactatcttttttatcgcctttgatatttttgtatcgcagatcgttacgtggcgaaccgtacttaggcgttacccattttttctggggaggcgaccattgacgaacaccgttatatttctgtagttgtgtaaagtcgctatcagcagaaaccactaatactcgtctaccttcaccaacagcttttttcgtaacaacagcaattatatcatcagcttccgcgaattcaacctttaatccaagataaggcatattctgacggatttcttcgaacacaggattcaggaagttgtttagacgatcccaatcccattctgattcttcgtgttcgatctgacgacgttttttgtagtaccaggctttttgcctacgccagtaatttctgtcatcgaaggcaatcacgatttctggatactcacctttaaattttacaacgttaaaccgtaaagtgtcaagcaccagatgacgaatcatttcgatcgtgatggatgcttgttcctttggtttgaagttgttcatcagtgtagcgatggaaatgttagagatatcgatgaccatagtatcatcgggttccccttcatcttgcatcagcttgttcaagttaaacatgcttgcaaaactgctcatacatacctcaatttttcaaagaacggggttattgtagtaacttacgaaatgaagtcaatacaaaagaccataaaaattttgatcaataatacttgatctgatcaaatttatgatctataatttattaattaataattattttactacaatgatcattgtaggtcaagtactaaaatcaataaattttatataatttagatctgatctatagatcattagatctactttaaccttaaataatatagaatgaaatttgattttgtctacagttattatataatattattaacttcaaagaggaaatatgaatactatgactaaagaaacaaccaatatctacgcagacaatgaaaaattataccctatcctctgtgcatggaaaaagcaaatcgccgaaacaggtgatcgcaaaatgcctaatgagttaggtgctgctattatggatattgcaaacgggctatcacgtcgttacaacttcaaccgttattccgaagattggaaaatggatatgatcgatgacggaatttccgctgcaatctcaggactgcataacttcgatgaaactcgttataccaacgtttacggttacattaacaaagcatgttggcaagcattcgtaacacgtattctgtacgagaaaaaagagaacgcgaagaaatataaattcttccttgagcacgtttacgactgcgaagattcagatatggttagtattgcagacgaaggtttcattcaagatctacatgacaaactatctcagtacgaggcttccgccaccaaaaccaaagacaaggaagcggaagtattcccaacattggaagattttctatgaaagcaataattgacttaaacaaaatattaactgatatcgattacgaaattgacttgctaccctacttcgtaaaattagagttgcaaaacgtgggaatcccggttatcatcgatccaactgacgtaagaaaccccgatttcgaagtagaagaaggggttttgtcttatatgataaacgccgaaactatgatcatggagatcacttatgattgatgaagagaaagaagtactaaccagtgtggaagaagtggatccagaagaggaaattcaacaaaagatccaggcacgtgtagaagccgacgcattgaagcgagcacaaaaattcattaagaagaaccggactgagatcaaacgcctccgtagacatgcagaggaagccctattcaggggtaataaagttcagtatgtgtatgcggttaagaaacttcgtgatatgctcaaacagccgtatacagaggatttcattgatacgatgtggaacacttcactggcatcaattcgaaatatcgtagcttcacaacagaagcactaacaaacaagtagccccgaaaggggctatgagggtcttatgagaaagtacttaatgatcggggatacacacgctggcttgcgtcaggacaacccctggaatgaagaaaacctatacaatgtattcgtgcaaatcgtagaacactgcaaagcaaacggcattaccgaggctttccatgctggtgatttctttgatgtgcgaaaggccaccacacaaaccacgatgaaattcattcgtgaacgtattgtgccactactggaagaagccggattacatatctatgttctggttgggaaccacgattgccagtttaaagacaagatccgccctaactcaccgcgagagattcttgatcagtatgattgctttactgttgttgatgaaccgatgacagtaaatcttgatacttctccgctacaatcaatcgatttgatcccgtggatttgtcaagaaaatacacagcagatttttgatttcatcaaaaagtcaaaatctcaatactgcttaggacactttgaactgtccggatactatttctataagaacagtaaagcggatcatgggcttgaaccggatttcttaaagaaatatgatatcgtgtattcaggccactatcatcacgctaacgaaggcgctaacgttttctatatcggtacacctcttaccatgagcgcgaacgatgaggacgaaaccaggggcttctatgagctatcttatggcgacggtaaacgtgaattaactttcattgctaacccagtatgccaccatcgccggatcacctatccggatcaaaaagatgttgatgttgccgattacaaaaattgctctgttcgtttgattgttcgcgaagttgataacgatttgcctaagtttcaaacaaaactggaagaaacagtttatgagttgaacattgtcgatcgtgtgatcactgattcagaagttgatactgactttgaaatcaaaagcgtatctggattgattagtgagtacatcaacaacatgcagatcactccagaagaaaagaccgaagtatctgcaataatgagtgcattgtatgcagaggttacgagtaatggaaatagttgattacgttaatattttaaacgaagaagggcgatataaagccctttataaaatgtttggatttgatgtgattgttgcagtacagcaggattcctataatgagtatgtgtcattggggttcactctgattaaagacaactatcacgaaacaaaggtttggacatttactgtcctgaatagcatggatgaagattccgtgatatactgctttgatagcacgattacaaacatgattagtgatatatcccaaaggataattgatgaaactcaaatttaaaacattgacttatcaaaatatcttgtcggtcggtaacgtaccgatcgtcattgattttgattcagcaaagaaaaccctcattacgggtaaaaacggcggtggtaaatccaccatgatcgaagcgcttacatatgctctctttggtaagtcatttcgcgatctgaaagtcgggcaactggtgaacagtatcaacaagaaaaaatgtctggttgaactgttgatcgaatacggcaatgatgaatataaaatcatccgtggacaaaagccgaaagtatttgagatctggaagaatggcgaaaaactgccggaagattcagccgctggtgattatcagtcacagcttgaatcaatgttgaatattaacctggtgggctttaaacaggttatcgttctgggtactgctggttatgtacctttcatggaactgaaaacaccagatcgccgtaaattggttgaagatttgctttctctgtctattatcagtgaaatggacaaactaaacaaatcatacatccgtggtgttaaccgtgaactggatacgctttcaatgcagattggacacgtacaacagcagatcgcaacacatcaaaagttcattgacgaacaacgggcaaaagcaaatcagaatacggcgcgttaccaggatatctacgattcccacgtagaaacagcaaaacagattaaagcgcaattagttgaacttcaaacccagatcgcagaatgcgtgatcaatggtgaagaccaaacagcaaatattcaaaaactgcgtgatggctatacacgcctctcaatgaacgtagaacagttgcagcgtcttgaggtgatgtatcgcaagggtggtgaatgtccggcctgtaaacagccaattagccccactcctgaacgcatggaagaaattgccgagaacattaaaaacggtactcagaaacttacgctgattaagaacaagcaagatcagctacagaaaatcatggatgatttactaacacaacaacgtacactaaatgggctgaaatccaaatacgaatcactacgcggtacacttcaaaatgaagttgcagcggctaaacgtgttcgggctgtcatggataaagcacaggaagacgtggtgatcgacgaatccccagttgaaaaactccgtgaagatgaaaaggaacttgattctaaacgttctggatttgtcaaggaaaaatattttagaggtattgttacggatctgctgaaagattccggcgttaaagcgagcatcgttaaacgttatattccttacttcaataaacagattgcgtactatctggatctgttgggtgctgattatcagttcactctggatgacgaatttaacgaatcgattaaatcgctgggtcgtaatgattttagttacgcatcgttcagtcaaggcgaaagagcacgtattaaccttgcattgcttatgacgtggcgcgacgtaaccagtaaaatttctggtgttgatttatctctcctgatccttgatgagatttttgatggtgcaatggatcgtgaaggtgggtttgctgtgagaaaattacttgatgatattgagggtaatgttatagttatcagtcatcaagaactggatccgcaagatttcaacaggcatattactatggctaaagttggtcgatttactaaatgtacgattgtaaacaatgattactaaaaaatgggacgacgaatttcaagccgagattcgtcgtcggttttaccatgtaggcgggattttgtatcataaaacagagagtagaccaacggtgtctgttcctgctggttactattttaaacccggtgatgtggtaaaattcaacaaaacgagaaaaaagaatccgtacttacagatttgtatgaggtatgaagggaaatctaactatctgtacgtgcatagagttgtctggtttttagaatacgggtatcaagttgatcttattgaccatattgatatgaatccattcaataatgatccttctaacctacgagaagccacgacgcaacaaaatcactacaataaaaaaggaaaatctaacacatcctcaatatataaaggtgtatcatgggataagccaacttgtaaatggaaagttggtatacaatacaataggaaaaagatccatttaggatattttgacgatgaaatagaagctgcaaaggcatatgatgctaaagctatagaaatcagcggaaaatacgcgaggttgaacttttcatgaatatgttagaaaaatcttttgaattagaaaccgccccagaaatagagcggttttatctccacaacaattttcttgaagaaaaacatatagttactatgagagatgttgaggaagcattcaaaaataatcctatagagttgacgcgaatcaagaacaacaaaagttctgtttggttcctcgaaaaaatctattgaccgaaatccataaatacagtaaagtagcccatgtaacgaaacgtgggctttgtttttatttgaggaacaataaatgatcactgaatccaaaatgacttatcaggaagcactgaaagttttgggcgcaactggtagcgaaaccagcgctgaaatgtccagactcttcaaacgtgcatccttacgcaatcaccccgaccgtggtggtagcaatgaattaatgcagaaaattaaccaggcttacgacgtagttacaaaaactgggcctagtggcgcacgttctgagactgctggtgatgttcgcgcacgttatgcacgtcaaaagaaagaatgggaagaaaaagttgatgcttactttgtagtggcgaaaaactatttcagcaccaaatttaacgcacaggaatttgcggaatacttcaccaaatacactggattgcctaccactttcaaacaggaagtaacaaaaggtagtcacggtgtttatgcttcgttccgtttcacttctggtgatgcttactttgatttcggtttcaactgcacccctccgaatggacaagggttagccgctccggattcatctgcactgggtaacgtttctgttagtacctttgtactggttggaactaaaaaacataaaatggcaagccgtgattatcaatggggcaaaaacccagacaagatcactccggaaagcctgttcccgtctaaaaaactggaaagcattttcagccctgtacataaaaatatcaaatacaaacgtgctgactacctggcgtcattccgtaagctgttaggcgctgacgttagcggaaacgatatctttgttgaagttggtacactgaaagttcgtttctatcgtcacgtattcatgcgtaaaggtgcgtatgtgtttagcgcggtgtatgatcctgctgtatctaagtatcgtccggctgcacaacttcgcggaactatgttcgaagatgaggacggcgcttgcctggatatgatcgttgatacgttcaaagagttgcagaaactgaaaccgagtgttcaaggcgttgtgaacgcgatcgataagatgaacgcagagtttgcagcgggacatcgttcagcatcttttgttaaacgtgtagctgctcaggaagccgcaccaaaaccagaagagaagccgaagcgcacagttaaccgtattggtaaagaggaatacttcgcagcactcaaagatattggtgctcgtgtaatgcctaccagcggttatgttgaatttgataacggcgctggtgttactatcaacttcaagcgtattgttgtaaaccgtaaagcatactactcattcagtagctttgatttcacgtactctggtcagaaacacattgagtggttgaaaggaatcgatatcgcagaagataccaaaggcgcaagcattagcctactcactgatactctgaaatctttacgtgggatctctgactggaacactgttaagagcgctttagatcaaatgaattctaacttcaaggcgggtaaattctccgcacctcatgtgaagaaggaagcagagcaaaaagcaccgaaacagaaagacgaaatcggcgcacagcctaccaaaccacaggcggctaagaaagatacaccagaagtggaaaaatcacaggctgttcatgcagcacgtgagaaagcgaatatgaacaacactattcgtaaaatgatgactatgttagtcaaagcacagcgcaaagacactccggaagatatcaagaaggaagttgatgcagcaattcaattgtggcgcttgacttattaatcaaatgaattataatgggaactgttaacgcagttccctttttatttgaggaaaatattatgagttgtccaacatggttacgtttggaaaatctgaaagaaggtacacaaaaacggatttatattaatcttggttgggttcctcctaccgattttcaaatggctgagattttaatcaatgctgttaaagaagtaagcgacacttacgaatgggaaaggctctattttcctttgattggtttgtatatgacgcgaaataaatttgaagaaatgaaacttgctgttattcgcgctacgattattaattcccaacaaagatttactttgaaaaatgcatggagttctgaatgattattcaagtatctgtacagggtgacactctgactgtcaccgaatccatcaataccgctcttgctgtatgtcgtgaccatatctcacaaaatcctccagtgactgagatcctggaaattgatgtttgggatcagattgggatgatcgacgcatcatatggatttaccccgcgagatgaagaactatctcgtatcgaatcatggctgaatgaacaggaaacggaatgaaactccctaagaacacaacactactaacccgcgaaaaacttcactctgttgattggtgtcctctggatatcatgatttttgatattgaatctcgcgtgatcaatgcaaaatatcaggggtgtagtattttctctgttgaattcgagaagattcgcggatatgatgagaagtacaaagaaaaactgaaagttatgattgaagcattaggctatattgtaactgttgaagacaacaaaatgtggatcgcaatatgagcatagtaaaagcggtgtttgcattgggaattgatatctatcacgatgatttcgcttttggatatcagcaagggttgccgtggggccactgtaaagaagatttgcagaacttcaaagaagaaaccgcagatagcgttttgatcatgggtgcaaatacgtttacctctcttccgggtaaacttcctggtaggatccattgtgttctgtctggttcaggtagttttttgaaaaccaaaaaaggcgacgttgctgattacgtgatccacggtggcgggttgtctgctgctattggtacaatgcaagcaacacacccagataaaaatgtatgtgtcatcggtggtaaggggttgcttttagattcaatcaataataaaatggttgatgaagtaattttgacaaacatttacggacatcatgtgtataacgcaccagcgtttaaacgtgatgttgcatttactctttctgaactgggtggcgcattattaaaatatgaattttctgatttaaaaactcagtacataaaagaacatgaacgcattgaaaaaatcgtagttgaacgatataaaaaggtataaaatgaaacaatatctggatattattaaacttgtacttgataacggtgttgaatcaactgatcgcactggtgtaggtactattcgtattttcggcgcacaagcccgatgggatctaaacagaggtttccccgcaactacctgtaaaaaactattcttcaaaccgtgcaagcatgaattgcaatggttcctgtccggttcaaccaacgttgaagaacttcgccggatgacctggggtgaaaatagcgataagcgcacaatctgggatgataactatgaaaaacaagctattgatttaggatacgattctggttatctggggccaatctacggtcatcaatggcgttcgtttggttctctttatggggatgatgatagttattatggcggtagtggtgttgaccagatcgcaaaagtcattgaacaactgaaatcaaccccagacgatcgcgggatcatcgtttcggcatggaaccctgttgatcttgatgatatggcattgcgtccgtgtcactgtttctttcagttcgttgtaatcaacggtaaactgtctctacagtggtatcagcgttcagttgatgtcttcttagggttgccgttcaatatcgcctcctatgctctcctgacgcatattatcgctgatatttgcgggtacgaagtgggcgatctggtttggactggtggtgatgtccatatctataaaaatgcggttgaacaggcaaaagaacttttacagcctaaccgttcaccaatgccattaccgattctaaaaatgccgaaggtaaatagcttacttgatttagatcaagaattctttgactcgataaccttagaagggtatcataatcacggctctctaaaagctgaaatggcagtatgaaaaatggggcttcggcccctttcttaacaaggtaagagaatgaatgacattaaagtagtagtaaaatcctctggtgtacgccagccgtttgacaaagaaaaaatatacaaagtgctcaagtgggcctgtgatggtcataatatcgatgttcgtgcattccttgaaaatgtattagaactgatccgcgatggtatgactaccaaacaaattcaacgtatcgctatcaagtatgcagcagatcatatttctgttaaagaaccagattggcaatacgtagcatcgaatcttgaaatgtttgcattgcgtaaagacgtttacggtcagttcgatcctatcccgttctacgatcacatcgttaaaatggttgaagcggggaaatacgataaagagatcctggaaaaatacagcaagcaagatattcaagttttcgaacgtgcaattgaccatgataaagattttgaattttcgtatgctggttcccaacagttaatcgggaaatatctggttcaggatcgcgatactggagaaatctttgaaacccctcagtatgcgtttatgcttattgcgatgtgtctgcatcaggaagaaactgggttagcacaggttacgcatatcgttgatttttataacgcaatttccgatcgcaaactgtctctaccgactccaattatggcgggtgtacgtactcctacgcgccagttctccagttgtgtagtaattgaatcgggtgattctcttggttctcttaacgctgtaacctctgcgatcgtgaagtatatttcacaacgtgctggtattggggttaacgcgggacatattcgcgcaatgggttctaaaatccgtggtggtgaagctgttcatactggtgtgattcctttctggaaacatattcaaaccgctgttaaatcctgttcacagggtggcgttcgtggtggtgctgcaacactgtattatcctttctggcatctggaagttgaaaaccttctggtgttgaagaacaacaaaggcgtagaagaaaaccgcgttcgtcatcttgattatggtgtacagcttaaccagttgatgtataaacgcttaatgaatcgtgattacattacgctgtttagtccggatgttgctaacgatcgcctgtatgatctgttctatgaagctgatcagactgcatttgaagaactgtatgaaagcctggaaaaagatccaactgttcgtaaaaaacgcatcaaagcggttgacctgttccaacttttagcacaggaacgcgcacagacaggacgcaaatacattttcaacactcatcacgtcaaccaacagggtagttttacggttcctgtccgtatgtctaacctctgctgtgagattgcgatcccaacgtcgccgctggatgatgatgataaaatggctggtgaaatcggattgtgtacgttaatggctatcgttctggataacgctgatatcagcgaattcccgaaactcacgcgtattgcagtacgtgcgcttgataacctgctggattaccagaactaccctgtaaaagccgctctgaaagctaaacagcgccgctctctgggtgttggtatcaccaactatgcatcatggttagcgagcaactattgcgactactcagaagcgtatacagacaaagttcatgagctaatggaagcgtttcagtttaaccttctcgttgcttctatggaactggcgaaagaacgtggtgcatgtggattgtacaacgataccaaatacgctcgcgggttactgcctatcgattggtattgcaaaaccgttgatgaactggtagcacctgtttataattgcgattgggaatggttacgtagccagattaagaaatacggcttgcgcaactctactctttctgctttaatgccttgtgaaagtagttcacaggttagtaactctaccaacgggatcgaacctccgcgcggtttagtgagtatcaaatcttcgaaagaaggacactataaccaggttgtgcctaaccagaataaccagattgatttctatgatctgctctgggatatggctaaacgcggtaacaaagggtatctgtctcatgtagcagttatgcagaagtttgtcgatcagtctatttctgcaaacaccaactatgacccggcaaactatgaagacgggaaagttaaaacagaagacatcattgatgatctgctgtatgctaactactacggtgttaaaactctgtactatcataatacgcgtgatggtgctggtgatgaagaagaagccgccgaagattgcgcgggttgtaagatttgattaatgccccttcgggggctttttaaaggtaaagacatgttaacagtaatgaatacaaacccagatcataaccacttagaacaacctatgttttttggtgaagatactggtgttgcacgttatgaatcgcagaaacacaaagttttcgaaagcctgacgcaaaaacagctttctttcttctggcgtccggaagaagtcgatctgtctactgaccgtatgcagtatgcaaaacttcctgaacatgaaaaaatcattttcgattctaacctacagtatcaaaccctgttagataccattcagggacgtgggcctaacctcgcatttttgccaattacatccgatgtgagcatggaaacctggatcgaaacgtgggcgtttagtgaaaccatccacagccgtagttacacgcatattcaacgtaacttgcacattgatccttctgtacagttcgaccaaatccttcgcaatgaagcgattatgaaacgttctgcatcaatgacacggtattatgatactctgattgatgaatgtcataagctgaaaaccatcatgatgctacaggaacaggttagcggctataaaccaaatgatccggctgtcgtgtattataacgagcaatacactaaacaggccactaagtgcaaagaagctctgtacctgtgtatgcacgctgtgaacgctctggaagcgatccgtttctatgtgtcgtttagtttcacctttaactttgctgaacaaggcaagatggaaggcaacgcgaaaattatgcgcctgattgcgcgtgatgaagcattgcatcagaaaggtactcagagtaaaatccgtttgtggcaaatgggtaaagatgatccagaaatggttgaaatctcccgtaggctgaaaaaagaagcaacggctatcttcctggaagtatatgaacaggaaaaagaatgggctgaacatttattctctgttggtgatgtagaaggtgtatcgctgaaaagcactatcgcttatattgaacaccttacagatcagcgtatgcgagcggtagggcttgattcgccattcaccccgatccctaacccgtatccgtggatgaataaatggctcaaaagtgataacgtacaggttgccccgcaagaggttgaagtaagttcttacctcgtcggaaacttgaatactgaaatcagtgatgaagcgtatgcaaaatgggccagcaaatacgcgtgattgtcgggtagtaaacaagtacaaaactgattgggatgtcgatattcaaagaggtacgaagttcggcaacccttatcacacaggaaccaggggagaaaacattttagcgtttatcccctggttccagaatcaggttcgtactggggcgatcacgattgaagaattgaaagaacttgatggaaagaggcttggttgtacctgtgcgcctcttccctgtcacggtgattacatcgcgcatgtggttaatgttttgtgtggtaagaaaagatcacttgactttttggatatataatgtatgaaatctgaattcaacttaacccttgataaatgtggtcgcatcgatcgaagttttgttaagtgtggtgaacttaggcattgtgtttattttattgcaattaacgatgaaatagtatatgttggtaagtgtagggatatgtggaagcgtttagacacatatcgcaatgcaaagtattggagagaagccaaccccagtaacatcttaaaaacgtgtcgattggaaatggctatcaaaaaacgaaaaactgtgaaacttatcgtgactactcacgatgaaaatacatatcatgattatgaaatcaacatgatacgaaaatacaaccctgaatggaataaacagcactatgacaaaggcacaaactaaaattatcaataccctttacaaacaactcatgcagttgtgtggtgaatccgaaacatttttcttcgttgatcaagtaaccgtgatgggtacacctgttcgaatctttaactatcgcatggcctcatatacagactggctaaagcctggtgctctggaatgtcgcggtatcatgtttgaaatggatggagatacccccgtatcaatcatcagccgccctatggagaagttttttaactatgccgaggtaaaggcatgggaagcgcttaacgagtctcctattgaattaggcgaagttttagacgtgatgattaaagaagatggttccttgatctcaactttccttgacggtggatttctggcggtcaagtctaaaggttcggttaaatcagaacaagctatggatgcgcacagcgtgttaatggcaaatcgtgaattgctgacccgcttaactgagatcgctaaagaaaactatacggtgaatatggaatacgtttccccgaaaaaccgtatcgttgttggttatgattctccggatctgcgtatcctgaacgttcgtcataacatcacgggtgaatacatcccttatgatgatctgtttgctgacgcgctgttacgtgcgtatctggttaagcgcgagaatatcgaagtactggatctggatgcattcgcaaaagaagcatatcagaatgaaggattcgaaggctatgttgttctgacaacgaaagggtttgtaaaaatcaaaacaaactggtatgtcaatctgcatcgcacaaaagatagcattaccaacaataaggatcttttcctaaatattgttgagaatacggtcgatgacctgaaacagctattcagttcggatctggtctctctgaaaaagattgacgatttcgaaaaacttttccttgatagtctcaatcgtttgagtgcaaaagcattcaaagccattgaagataacaaagggaaatcgcgtaaagattttgctatcagtctaagcgcggatttgtcaaacgacggtcggatcatcttcgggcctcttatgaagtatttcgaagaaaccgatccacaaaaactggtcgatcgcatcattgaaatgatggttaaaaattacgatcagttcattcctgaacaatataaatgaggttcataatgcctaagatatcatcttgggtatggcctgtaatcgtggggctatctttgatagcccttttttacattgcagtcgataccaaaatcgaaaacgcatcgttacgcaaggatatcaaatctttgcaagatgatgtgaagaaagtaaaagagacaaatacaagcaatactgttatctacgtggaacaaaaatccaaagatcagcagttagtcaaggatgcagggcgcaaacaccttttgtttgagaaacctggattgattgaaatcaaaatcaacaaatccttcgacgaatacatgagaaatttcgataatgaccaatgaagaaaaatgtaatcatgtactaaagtatgtgaaagtagatattgagaatgggatcgcgtattggaagaatccaaccaacccaaaaatagccatcaacgccccagcgggggctaaagataaacatggatatacaattatttgttgtgatggtataaaagtaaagagacatagattagttttctatgttgctaaaggatatctccctaaaatagttgatcataaggatggtatagaggctggagacggcataaacaatttacgagaagcatcacctaccagaaattctagaaatagaggggaaccaaaaacccaaacaggaacaggtattaagggagtatacaaaatatcaaaaaacaatagatatttttcaagtatacgccataatggtaaaggaatatacttaggtagttacgatacagtagaagaagctaaacgtgcttatgaaatgaaggctatggaattgtttggtgaaaattataggagatttgaaaaatgaaattagcaatgatagtattacttggtgtttttctcgttggttgtgctgaacagccacctgttaaggtacttcctacgctacccgcaaaggttaacccagtgaaggtaaaatggaaagtaattgcagacgttagagaaatcgacgggaaacaatacctcgtaatgccatatgatggtaatccttatgttgcattgacatatccagattcattgattttacgtagctggatgaatgacgttaaaagacaaaaggatcaaaccgataatgttctgtgtacgttgggataccctgagaaatgcaaatcaaaataactaaaacgttttttcgtgacataacagaaggaaaagtttatactgcgaaaaaggataaagaaggtctatggatagaaaacgattggaatcgtgatatgtggctcaatctgacgaatgagtataacaaagaactaattgaatatgagatagtgaaatgaatttgtttatgactattggcgttcctggtagtggaaaaactacctgggcgcatgagaaagcccgtgaattgggtaatactgttacgatatctcgcgatgatctgcgtagctctttgtataatgctggtaagggtgctggcggatacaaatacaccaaagctaaagaagaaatgattgcggaaatgcaggatcacgttgttatctccactctgaaagatggtaaaaacgtgatcatacacaacacgcatctgaaagaaagtgataaaaatcactggcgtgaaattgcattggaacacaaagcagattttcatatcgaatactttgatgtgtccattgttgaactgcttcgccgtaaccacaaacgcggctgtgatgcattacccgtttcgcgtgtttgggaaatgtttaaccagtatcgtaagatccgtgggttcgtaccagcaatggaaattgtcaatccccacaatcagaaatgcgtgatctttgatgttgatggtacgctaacaaaagtagggcaacgtagcccgtatgactttaccaaagtgatcaatgatccgccaaacatcccgatccagcaactgtttcacctgtacaaaaatgcagggtataagtgtgttgttgtgtctgggcgtgaaggtaatccgcaatgcgcacatgatacatgggttagcctgttgagttatggcgttgaaccggatgaaatttttatgcgtcaagaaggtgataccaggacagattttgaagtaaaagaagaaattttgtttgacaagattttagataagtattatcctgttattgcagtggacgatagagacactccggtcggaatgtggcgagcaaacgggattccgtgcttacaagtcgattatggtgatttctgattgacatataatgtgggtatgttaaagtacccacacaaaagaggattatattatgaacgttattcgtgaagataaacacatcatggttgaacttggcgatcgcattcgcgtagaaaatctgggcgattttaaccaaaaagttcgtttgttgtgccaaaaaattgctaacaaaattcaggaacagggtaaagctccgggcgggtttgaagttagcgccactccggtttctcagtactcctatattgtgtatattcatgacgtggatactaacagcacccaatctttcgggctggtgttaaatcctattactggctacgttacatgggcggctgtattatgaaagtaaaagtaattgatagagcgatgatcacggatgaatctgtatacccagatcctcgttattatggcggtgttttcggatacatcaaaggaactgatattgatgtagtaacaagtccgatcgccgaatacgatatcaacaaagatcagacagaagttcgcgttactacaatcaacggttcagaatatatcgttgaagcgactcctgattttatcaaacagttactaaaggtgatgaaagatgcttgatcatcctggctctatgagcatggtgcttctggaagcattgaaagcatatgatatcccctgtcatttcggtgaagtaactgttaatactatcgttgacgaaatcgacaatccaaatactttcattgcttgtcttgttcgaaaattcacaagttgttttcgaccgagtccagaaaaagtagtaatcagttctgtttctgcacatcatcgagtgttagatgatggaaagattcaactttactggaaagttctttatcacgtggtgtatcatgaagattgatgatattatgtttatgcttagagcaataagcgcttctaagttctctcaatgtgtctccgttaatgttggtgctgcattgagaaatggtaacgggcgtgtgtttgtaggcgcaaataatacggttgatcctagtcatcgttgtacagatcagtgcaatcacttattagatgataacgggaaactgagtgaagaaaagcgccctgaacattcacaatggtcagatcgcaacgaagtacacgcagaaatgcgcgttattatgctggcggcgtctcatgaacaaatcaaagacgcaactttgtatacaactcattccccttgctcacaatgtgcgaaaaatatcgaattttgtgttgcaacaggtatgattaagcgtgtagtatatctacataaatacgatcgtggtggcatcgagtggatatggcgtctacagcaatacggtgccgaagtagtacaacttgatcccgaagaattgaataaacatttccggattaaataaccaatgagtaaatgtatgtctgaactgagtgtaaaagcatcctttgaatatgttctgattgaaaccaacgctaaagcggctggaactgaaattgtatcaccttctggtattgtgactggtgttcgtcaacacggcgaggaaccgatctacggcacagtgttatcatgtgggccggatgtaccggaagaatataaaaccctgcttatgggtaagcgtgtaccgcttcctcatgcacaaatggcaaacgtgccggatcctgaactgattgcaggaaaggcaacaaaagaagaagctcgcaagtatccggttaaatatgtaaccgcacactataaagcgattcaagcaatttacgaataagagatccaacatggctaaacaaattcaagcaatcatcgccgataccgtcgcaaaatccaaaaaacttttcgacaaaggcgacatcctcgaagcaccgacccgcatcgatgtaatgacttcaatgatcattgatgctcaccagggaaaactaaattcccgtgcttcggaagtaatggaatacatcgtacagttcgaggatgtatgcaaatacgccaaagctgttgatccggctgttcgcgaaatctaccgcaaacagttctaaaaatattggccccttagctcaataggtagagctaatcactcataatggttaggttcccggttcaagtcacgggaggggccaccaaacaaggcaaggcacttagagaagcgggaggaacagaatctgattctgttggttgtaggtgcaaatcctacccttgccaccaaatttgggtgcgtagcgcaatgccgttaaatggttcggaatatgcaaccttatccacaggaaaggctctgttggtatccggtaataggttccccggaatgcggggtgaagtaaagaaacttccagcccactaattttaatgaggtttatatgaaatttcgtgaaactgtgaaataccataacgcggtcgaatatacacagatttttgttgatatgtctcccgcaaaattcaaagaacgttatggcatgacatttaatgaatggaaagatggattgcccgatggggattaccgaaaaaacttcaaattcagtgaatgttatgtggatgatgacccttacgatctggatgtttgtagtaaaacaacacctctcattgagaattcaccagaacagctttacgaatcttgtattgattctgcatacgaaatttaaagagataacatgaaaaatttacaaaaactgtttaaaatgtctccggcaattagaaaaatcatcggagaaagcaatccaacgaatcgcaataaaaaattgatggaactttttgtaaaagagttcgatgattttgattctgaacttcataaagcgcttgaggcatattccaaacaagggttctttgcatcgccgcaagtgaatagtaagaaagagtatagcgaacgattctttgattgggagattgtcaatctcgttcgtagaacaaatatatctccgagcaatcatcaattgatttctcttgatacttcggtattctttatccagtatcttatcagtggtggtttcaaaaatcctgaaattccgtttacaaatgaagcggttagcagtgaatttgatgaatcatttgtatacatcaacacaaacaaataatcaaatggctatcttcggatagccttatttttggggtgtctatgcgctttttaaagtatgcaagttggatcgtactcgtccctcttgacattattactggagtattagcaattctgtttgccccgtttgttgtaccattctacaacgagaaaacagggcatcttcctaaaggcttccggtggatggaaaccttcgataaccctattgatggtgatggtggacatatccgccgttgggcgtccatacgctatcatctgggggcttttggggtgtacatgcaacgtgttggctggttgtggagaaacaaggcttataacttcgcatatcacgttttaggacgtgaagcgacaagcaaattcaactggaaaggcaacccaaaaacagaaggtgggccgaaccctgtaaatcatgggtatctgctcatgtggaacgaatcagcatggggtttgtacgtttacaaaccgtggctacggatccacaaagtgcaattctgtttgcgcgtttatgctggatggaagctgaaacaagaagttagcgacccagttaacctggatcgtgcaatgctggcgtttcatttcaacccgttcaggtattatgtaatcaagtaaaggtaatacaatgaaagcatttcaaattttagaaggtttgcatactggtacgatctatctggaagaaggtaacgatgttcggatcgtagtatcaaaaacattaactatggattctgtgatcggcaaagctcgcgttactccgtttgcaaagcgtgagatcgagatcgaatatcagccaactgttaaggtggaaggtggacaacatttaaacgttaacgtgttgcgccgagaaactctcctggatgcggttgaacatcctgaaaaatacccacagttaacgatccgtgtttctggttatgcagtgcgttttaactcactgacccctgaacagcaacgcgacgttatcgcccgaacctttacagagagtctataatggcaattgatgatatcaagggttataaaccccatactgataaaaaagtagaaacggtaaaccgtatcaaagatgctgaaaatgcattaggtgcaatcctggaagatatcgaacagcgactatcaaattcagatattgattcactgatagaggaagaattagatgaggtgcttgaacgtatccatcaaattcaactagcgaaagaccgactgaaagaagcctctatgtgggcgtgtcgtgcggtgtttcagcctgacgaaaaatattaaaaatcaagccgttgccgaaaggtagcggctttttcttttttggtgtaaaaagttgttgactcccttctcacattcccttatagttaatcccgtagacaagaaaacacttttatgaggatgacattatgaaacgctcttacaacatgaatgaactggttttcttcaaaactcgtcgtgaagcacgtgcttacgttctggcggctggtaaaaatacttctgctgctatcgatatgggtactgataaagctgttggtgctcgttgggccgctgttatcgttatcgctgctccggttactccggttaaaactctggtacttggtgcgcgtcacgccgaaactcttaacactgctgcaagcggtaggggccacgaagttaaagtgttcaagaagcgttcttatctttcatgtgcaaggggttaactatggcacgattcatatataaagtggaatacgaaaatactgagttatctgatacctttttgaagatgattcgtgatcacgggcaacgtctggaaagagtaacgattgatactgcgtttgattgtcctgttgggttggttctaacattatcttgcagccccgcaaaagaatcagcccgtgttgaaatgttacataaactaaatgcattttatgaaggtggtagtgtatggcgagtattgtaaaatttttcaccgactcagtgaaagaaattaaaagcgctctggaacaatggaacactcgttgtgatgtatccattaaatcagagtacgaaacaacttatgatcgttatgatccggcccgtggtttgcacaataacccccatgaggtggaagtgtgaaatactacggattcaaaacgagtcattttggtaaagcgtatcgtacagaaaacatcgatcgcaaacgtccgtactatgattctttagtacgcgcgggacgcaaacgcgctcgccaggaagggaagaaagaaggtgaagatcgtggataattggaaaacatgggtatcaattatcgttggtgttatcatcggtcgcggtttgtatgatttaatattttcggcgggggttcattatggacattggttcgggtagtcagtacccatcatgcgcgttaagcaacttcgctccgcatccgtttacgtttgacggggtagaatgtgcatcaatggagggctttttacaaagccttaaattcagcaacccagatatgcaagcccatgtatgtactctggtaggcaaggccgcaaagttcaaaggcaaaaagaaaaaatggtggactaaccagaccttatactggaaaggtatccctattcatcgttcctctgaggcgtatcaaatcctgattgaaaacgcatataatgcgttattccttaatgaagggtttcgccgtgcgctggcagcaaccggaaaaagtaccttgacacattcaatgggaaagaataagatgaatgaaacggtgctcactgaacgtgagtttgtccgaaatttaacccgattgagagatctgttatgagtgaaaaagaaagagtagaatgcgtgtttctgttcaaaggcgcgattaatccattagcgttactgtatgcgcaacatgcattacgttcaacgttgattcagagtgttatctataaagcaggtgtgtattatgttaccatcggcgcaaataacatggttgttattgaatcctatgttaaggaatgtgcatcaaacggcgttgtctttgataaagtcgattttgatgcaggggtagatgctgtttatatgtataagggttgatatgagttacgtagtttatttcgattgttcggatctcgatccgttcgtgcttcaacaggcaaagaaatatcatcaagatgtcgttggcattggtgtaacaaatgatgatatgttgtgcatcgaatttgaatattatcggacatttgagcgtgaacaattcctgggtgaattgaatgcattcaaaagtacccttttctttgatcgttatgaggttatatcttgaaacctgttattcttaccgatattgacgggatcgccgtaaaatggcaaagcggcctcccgttctttttgtctaagcacaacatgcctactgatattgcattagaaatggttacagatgaaaaatttcgtgatatgaccgaaatcttcggatgtgatcagcagttggctaaaatccttatggaagaatacaataacagttctttcattcgttatctgaatgcgtatgatgatgcattgattgtgatcaaccgtctgaaaacgcagtatgatttcgttgccgttaccgctctgggaacaacaccaacggcaagccttaaccgaattgctaacctgaatactcttttcccgtctgcgtttaaagaggtgatggtcgtgggccacggtgaaacaaaaactcatcgttacctggaagcaaaagcaaagtatggtaatcgtctggtttgctttgttgatgatctcgcgataaacttaaacgaatgtcataacgtcattagtcagttgccgttattccatatgttacgtggtgaacgtgaagaaacaaatgcacctcaccagttagtaaaatcgtggtttgaaattgaagagaaactaaatgatcttgtcaatccttaatgaacttgcgtctactctgaaaaccaaagagaaagaagcaattttaaaacgtaatgccgataatgaattattgaaagaagttttccgcattacgtatacaaaacagattatgttttatgtgcgtcaatttcctctggtagaagggaaaccaggcacaacaccgctttccgatgcaatcaaagcattactggaagatttagcaagccggaaatatacaggcaatgcagcgcgtgatcgtttactggatattgtatcatcagtgaacattaacgatcgtgaagtgctacgccgtatcattaaccgcgatctggaatgtggtgctggcacaaccttaccaaacagggtatggaagaaactcattcctgaacagcctcaatgcctcgctacgccgtttagtgaaaaggctttacgtcgcatcattttccctgcttactcgcagcttaaagccgatggtgcgcgttgcatggctgatttgctggaagcattaaaccgtaaggtatcgagagcgggtaacgagtacgaagggttaactcagcttgatatcgatctgaaaaagattcgcgattatctgggatatgatgtagttctggatggagaattgatttatgttccttccggaaccgtaccaacattacctgaacctgaaacagacatgcctttttctttatctgctttcatggacgatgatgataacgacattgcgttatttgcggaagaagttcgcaaagtatcgtccccagaagaagaacaggccgaagcaaaacgcgaagaagggaacgggatcgtaaacaaatctctgaaagggacgatcaccgaagaagaacagcgaaacattgtttatgttgtttgggatattattccatatgaggtgtattacggcgaagctgaaagtgttcagacttatgatgagcggtttagcctgttgcgtgatatcctcctggatctttctctgccttctgttcgtttgattcagtctaagctggttaataacattgcagaagcgaagcaggactataacaattaccgcaatgacggtaaagaaggttctattctcaaaaacagaaacttcaaatggaaagattcgcgagtagccgatcaggttaagctgaaaaacaaaaccccgattgaactacggatcattgatatctacgcgcacactaaagaagaccataaggtcggcgggtttgtggtggaagatttatccggaatggctcgaacgaataccggatctgggttaactgataccgattatcgttacgatgatgatggtattacccgtgtatacattccattagatgaacgtggtgaactggatcgcgaatacatcatggcgcataaagatgaatacattggggccattgtagaaatggaagttgacggcctccagaagtcgaaaacgcgtaagaaaggggaaccggaatacagtttcttccttcctattatcaagaagataagacgcgataagaccgaacccgacgatattcatgttgtctttgcagatctattttaataaaaagcccttgactccggtcgggggctttgttatattgggcctatcgaaacgtaaatcactaagagaatatattatgactagtagttatcagaaacacaaaacccttatggcaaacctgtccggtaaacatatcgacgaagtaaaatctctgctgacagtgaccgaaggttcccgattcgaaacaaatcacattatcaaaccttctgtgaagaaagtactgaaagtgatttaccgacatccggtgtatcagtgcgttcatatcatgaacagcaacgcatttattttcgtatataacgaatccgatgataagtgtgttggtattttccgaaaacctaactttgaatgcatgagcgaagcggctgttgcaaccccgatcgttgaagaatatccggattatgttcaacgcaacatgcgttatgtgcaatcccgacttgattatgcatacgatttcaattctgacgcggtagaagcgctggcggatatcctttgcaaaaaccagaaagatcgtcaaatgacaaaatatctgactgatccaacaccgccaacaattcgaatttctgttgaagttccgtttgaaaatcatttcatggcagttgaagcgcttgctaaacttggtttagaagtgaaaacagaagccgtttaatagcactttttgttaaagaagcctcttgcaatgcagggggcttttttgtatagtgtgttcattgaaacgaaacacggagataaacaaaatggctcacatgatgaagaaagcagaattccttaacctggttaaagattgcggattcgctcacttgaaaacttttcgtggtagtgtttacctctatgaccgcgaaatccaggttgccgaagtctattgcgcttctaacatgcaagaatctggcattatctctgcaatgaaccaatcaatcaaataccgtaaatggatgggctgattatgaaagttaacgtttcttatgaatctcgcgttaatggcgcacagtggcggaagctggataacggacaagtggaaaggcgcttacctggttccgatgagtggacacttgcggcagtgttggaaaccgaaatcgatctggcaacaaaagacggtattttgtttgaggtgaagaaatgatcacactcagtgattatcttctgtttactgctctttgggcggcttcgatattcataactgctttgatttacaataaacgtgatgattttgggttgtgggtattcattcacgggtttcctctgtctatgtggatcgtgatgactgctgaaattctccattaatagcactttttgctaaaactatcttgttcttgtttggtatattgtgttcatcgaaacgaaacagacaaaaggaacatcacatgaacttcatcgatatcaacaaagatttagaaggtaaaaacatcaaactcgttaaccgtgaaatgttagagagtcttggtaatggcggcgaaaaattcagtgaagaattctataacaatttatcgttgatgactgttaaacgcgttgatgttcagggtggttctggttgggtttctgcaattccggtttccctggtagatcaagcaacatatgacccagttgccgattcatgggatctagaaatgccgttggtattcgaagaagtcatgaagtgctacgaaatcgcataagggtattattatgaatagcggaaaattacaaatgaaagttagcgaagaagaagttaaagagcggttatcggtagcaagaagattccttgaatctatcgaccctgataaacttggaaaatgccctgatacgatttgccttaattgtgggcgttctgttcttgttggtaagtgttgcgataatccaaatatagttgtgatggaaaaggaacaagtatcccccgaaacatgggatcagatccaggaaatcattaaaaaccctccagcgccaaccaagaaattacgtgaattgatgacaaggaaaatgaaatatgagcaaatttaaattgagtgcaaccgttcgccttattcgttggaatggtgaagagatccgttatgatgaccctgaattcgcccatgaaattctttcacatcgtctgggattgaaaaacgcgtcattggttcagactgttaaaacatcagcagatccggaaatttggcgttgtgttatcctggatctcgataacaacattgactatgatgatcctaagaactatccgcttctggaagcacaagttgagaatgctccagaagacagacagtgttttttggttgagttaccacgcgaacattacgaaaacatcataaaggcccgtaaaaaggtcaataacaatgttttcgatctccacctcggattgtttgaggattaagtactgctagttgtgttcgtagtagcggcgctggtaggttcccccacctgtatacattcaagtgtttgcaggtggaaatcttttgatacgtctcgaacacattcaacaatcagatattttcctgcatactcttccccaaatacctcaatgattgtccctaccttaacatctaaacgaccctgctttatatcgaatcggatccggcgttcatagctggatagcaattgcattttagaagcctggaacggtttaccttctgaatctgggttctgaaagttggtatcatagattgcattacggtttgtgaagatccatgtattctctgtgtctgtatcagccagtatatcaccgtacatctttttatcagtcaatgacagactaaagaaactggcgtctttaaacagcgttgtgttatccttatgggtaatgtactgggcttctgtgaatatgacagtatccccaacaaacacgttatcaacgttaaatttgtatgctgggatcggtgtctgggccagaatgtcagttgaacttttaaggaaaataccggaaccatcttcccacagataacagaagtcagaagaaactacactttgcccgttgtccctgatataatcaaatatatcctgatatgtaccatttagacatccaggagggatacgtatgttaccgccgacaacttcgggggtaagtagtttcattttgctatacagtgccgtcatacactctgtaatcgtctgtacggcgttgttactaaatgaacgggcaaacttacgtctgaacgttttatgcagcggagagaggttcatacgcagcacagaacggttcttatcgtcagtatctacgttagagtaaagcaatccgtaataatgttgttcctgtgtaccgttatactggaaagatacctgtatgatcggctggataagttgctgatagattaactgtgcgtcgtatatctgcatcagcgtttccgatgagccgttaatcatcgtcttttcactaaacgagacaagagcgggtagcaattcagtatatgcgttatcaatgtatttttcgtatgatgtatataatttaatcgatgtgactcgattgacgattttttcagccataaaaatccctcctaatatatcctatttactaaatagtaaataatgacccaggttcaatttgaggcaataatgaaaaataaaactcttgataaatttatgactacacggcttgaaatcaagaagactaacgttaaaaccgttcatcttccggatggaacagccattgagatccctaagatgtcgtatcgtcattttgtaaagattaagactctgaaagatgacccagttgcgatcatgcgattcatcattgatgacatcaaaccgcgtgaactgacagcagcggaaattgaatttgtgttgatccatatgtatgcacacaataacgctgattatgccaatacgcttaaagaaattgggctaaatcttgatgacctcaaaatctccgaaccttgctatgattttacgtttgacaacgtgcggttagtctttgacaaacccagcctgttaaatgctcaccttccgttcctcatcaaagaggcatatgttgacggtaagccagtagaattaactgaggataaacgagacgaattaattaattgcctgtaccgattcgaatatgatcaggtatcgcgtggtgtcctccaggaagtatacattatccatgaggggaaaaccatcaaagggcttaacatcattggtgaatgataatggctaactcttatttcaacgaagaacaaaagaaaaagtttctgaacagaaacagcaacaaacaaccagcggtcaccaaagtaacagcctcccttgatgctgaaagcgcccgtgacctaaaggaaatcaacgataacacccttgaaagtgcaatcaatactcttgatatcaaagaagggttgaaatcgttcgaagaaaaattccgtgacaaattcgcggggttcaaagaacaatacgaagaggataaaaaggaatcattagccgaacaactacctgatttcgtcggcccgatccgtcctatatccttaaccgatgataactcaaaaactgttgacaatacagtaaacgttaaccaaaatggtcagttcggtaaactggaagaaaacaccgaatctatttttcatgctattaacaaacttgttgatttatatgaaaatactgataagcataagccgcttcctgaaccagtggaagaacctgatccgtatgtagacactaagaaaaaacgcatcaatgatgatgatgacaaaagaagcaaaactctggatagtattgctaaaagtctggtttctattaaaggttttacatcgcagatccttagccgtttcattggttactctctggaagcaatggcaaagtttgctaaatggacgctccttattggttcgttaatctttacattcgatgtgttgcgcgtcacaatacgcaaatggttcgaagatatcctgaaagaaggggaatcctcaaagaaactatttggtacatatctgggtaacgtaaaggctatcgtaacaaagatcgaagaaggtttgaacaacttcaatatgaacaacttaggcgaatcacttcgtgatttgttcgttgagcctatgaagttgttggggcaaactgtacaaacggcaatcactgagggtatcggtcgtcttattcaatcattgggtgaatcaactggcatagacagcattaccaatgccggacgcggaatgcagatcaccgctttacgtgataaacagaaatttggtcttgaattgactaaagaagatattcttatgatcaagaaacaggaactagaagaccaaaaagcggcattagaaaaagaagataaagctattgcagcacgtcatgcattaacaataactccttctcaaattcctaatggttctatctataaagttgctcctactgattatcaagaaagaaatcagaaaaccgtagatgctgataaagaacggcttgataatatgaagaaagcaacggaagaaatgcagaaacaatacgatttagctaaaagcagcgaagaggaagcacaaaaattagccgatgaggaaaacaaacgcaaccgcgcacgtatagaagaagcaaaaaggttagaacaagcgaggaaggaaggaaaacagccgccagaaggtgaagagaaaaagggtgatgatctgttgggtaaagcaaccaactatgctaactctgaaaatctggatgcagccgatatcaaatacattaacgatgaactgttggatcagcttgaaaaacgtcgtaatgaaggcaatctggacgatgtacagaaggatagaatctctgaccttatcgagcaattgcaaaacaagattgcagcccgtacagaatccagcgccccgatcgacgcacagccaccgttagcagcaaataaaccggatgctgataaagcaagcaacattcaggttaacaacaaaactgttaacaacaacgtaactcattcagtacaacgcacagagcataaaccgctcgtagcgctggcataaggaacatataatgaagttttctattattgatgacagtataaacactctcaaaaatattaaaaatcgcggtatcccctctgggggtgccgcaatcacagaatcagtattaaagcaaactatcgttaccgccgaatttccggcccaacgtgcagcaggtatcgataacgcttataatgcttcgagtctgtataataacggccttctgttcactgcatatgattttaatggtgttggtagtaaagacaactatcgttcattacgtcaggcagcacagaacccaaaacaaatactatcatctgcgactggtaatgttaagtacaaacaagtgttgaatagttctattggtactatggaacctgtttgccagatcctgctaccgcgaagcctgaacgataacgaagtaaacagccaccgctatcaagatgcaaacgatagtttcttaaccaaagggttgagccgtgttgtttcaaacatggtatggggcgctgtagaatccgtttcaggcggtattatggcagaccgaagagaagcccttgatgttggtactaaagccgctttccagggttctgacaagcgaacaaagatgtattacaatacattcgtgatcgaaagccgtaatgatttgctggaactgattaaaatctactatctgtttactgttctgggatatggtacaacttctggcggtactgctaaagaggttgctgcattggttaaacagtattacggtgttctgggtgctaaaaccgctaacgcaattagcccttccagtaacccagtaacagcgtcagattttgataatagtctgggtaatgacgtggttgatttcatttcaaacgtagaggttattaaatcgcctcctgtctggtttattcgtgatttccagtctggggattccttgcgtttacctcattcaacctttgggccagcaggtattaccagtgttcgctttggtcgttctattgataatattgtaaatacattaagagaatcaccaaataccccgatctcacttgaggtcgaaattcaatttatggaactgatcgatatgcgtcaggattctatttttgatacaaattactaaggagatatgatgttttacaacgtagatgaatttttatcaggtatggctaatcgcgattttcagcgtagcaacctgtttagcgttgtatttgcaaccagccctgcatcacgtatccttgacaacacgatcggtagtattcgagatactttgattgatggatctattagttctatcaacgcaaacaacccgaacgaattcattaatgctatcactggcggtgtgagtaaattgtttagttacaccgtcgataaggcgattatgtcgctgaacaaaacaggatttagcaaaatcatcggggcaattagcccccgcttgattacttccctgtttggtgatagcatgtatggacagttgttagctgaattccgtgataaaatgatgtataatatgggtttaagcatcatgggagttaacctccccggtaaatccattgggtacgaatacgtttataatggtggcgtacctcaaatcagattcactcgccctgagaatggggaattgtcgctgacgttccgcaccgattcagaagcccgtaacctgaaaatctttaacgaatggatttccgctattcgcgatgatgtaacaggacaatacgccttcattgatgaagtgacaagtactattcaggttaacttacacgatcgtgatggttcaccgcatacaacatacgtatttcagaagtgcttgcccgtcaaaatcagtaacagtgaattgagctatgagaacaacaacgaaatctggacatttactgttgattttgcctataaaacatcatgggttgttgaggctgataaagaaggctgggaagggttcaaacaatccgtagaggaaggtttagccattgcagcacgtaccgcaattacaggacaataaaggggctacggccccttttgaggatcttatgtttgatattattcgagtaacattaccatcagggatcaaacgattccctatgtttacagttaaagaccagtttaaattaatgctgacccgtattgatatggaaggtcggccccttaaagagcaacaggaaatactggatgaagtgctggatctgctttatcctgggtattccaaaacagaacaggaatacattttcagccgggtgtattgtggttcgttcggtaaaaacgttatcaaggttgtgataggcggtaaaggtgggggccactccgaagccttcatggtgattaatgatattcaactagaaaatgaatacaagttgaatgatgaaatcacattagggtttaacttcccccgtacacgcaatacaagcgaagagttgtttcttgaatgtatcagttatgtaatatacaacgaacagcgctatgaatggacatcactaaccgaagaaacgaaagagaatattcttgatatagtcgaacttgatgatgtcgaaaaaatagttactatgctaacgaaatcggttgatgtgtctatgcgcggtaaatcatttagtggtatgttaaccctgttcaagatcctgtttagtcgcggggatctggatgaatttgtgaagaccaactatctgctaaataaaaacggcctgaacctggaacctatcatgaatagtagcccgatggaaaggcaaatttatactgcattgcttgcagaagacttgaaaaaacaaggtgctgttaaatgagaaagcatgaatataaacacgttgagaaatataatgttgattatcgtcctctgacacatacagagtttacccccgatgtagattttatcaaaggggatgtttacctgtatcaaagagaatatcttttcattctggcacttctggaaagtaaaaatattgatacccgtcaactgttcatcaactgtgaagaatgtcaggaaagaattgaattccagcttaaacgcaatcaaataatggttgaagatttcgacgataagctatacggcaatgacgggatcgcgttatctgttcaccctcgtaagactggtgatgaagagatccccgatcttatcgattacgtaatgatagacggcgaacagatcatgtggagtgattgcagcgacaaagataaagaaatggtgttggatgcaatcgactatgcaacctataaatcgatttctaccgcactggataagccagcagtggtcgcaaacattccggtaaggtgttcgtgtggacatagccatatcgtctctctgagaggcttacagcaatttttaaaggtggtctaaatgggtgtaaatctgaggttgctatatagcgatatagaacctaacatgcaacgagattggaataatgacgtagcggcctcaaaaggggccgcagcagtgagaaatagtttgattggtatcgtaaccacgatcaagggtacacgtccatttgatagtaactttggttgtgctattagtgatatgctgtttgagaacatgaaccctctgacagcggaatcaattagaacttctatcgtatctgcgatccggacatatgagcctagagtatataatctttctgttgaagttattccacagtatgatgataactcagtaacagtaaccatctattacagcatcattgatgacccggatgacgtagagcaaatcaaactacagctttccgcatcataacaaaaagccccttcctttcggttggggctttcttttagaattcaatgaatcccattagtgtttgatatcgcaattcaaacggggagatataactttgcatctggttttgatcggatacgatgtaataatacacctcatcattatcatcatatagcgcttctttgatgatgcaataacgatcggtttccacgttcacataaagagtatccatgtactttgtaactttggaaccctgtgaactgatttcacgaatagcgttatctatgaaaagcgacaatgcttgcatgaagttatcaaactcaccatattcacagcccataatagaaattgcagtgtattggtgccagcctttgattgtgtctccacggcggatccatccaatttgtctacccccgatagatacacaccacactttaccaacgggactatagaaccgcacaacttcttttaataacagggacatgatcccacattttgtataaggattcatttcaacctcatttcatatcaagtagccaggaagggctagtttcaagcgaaattgcagtatattcgtattttacagtataacctttgaaaccgaaaggaatgactgcattttcattgagatattttactttatgctttgcttcttcttcattcagagcagcacagactgttgtttgttcaacgttaccagcaggagaagtaaatttttcaatgataatgtatacgcagttcatcctattgccctctttccattttttcaagtttcagtgtatccacttgtagttgaagtttaagaatacaacctttcgatatgttatacaagtagtcactaacgatttttgactttacctgatcgtaatcagaagataacgtaatccaatcatacatcgtttggtatgatggaagatacgtacattgttcttcttttgataacgctttaaatgattggtaatcggttggaggttccgaagcaattgcggttgtggtcataagactaagtgcaagtagtagatatttcataatgtattcctcattgttttcgatagaaccaatatagcaaaaagccccgaccgaagtcaagggctttttcatcaatgcaagaaagatttcacgtactgttcgatcttttcacgacatgtatcaactgaggtgctttccgcaattacggcatgacataacgcctcgcctccgacccagaaactcatcatgtactgaatatcacgaccttccatttctttttgatgcgctttgattcgatcgaaagcgttttcgattgtttcagtagcagtaagcatttcggattccccgtcaacctccgccagttccccatcgatcatttcgctttcgacttcttcccagtatactatcgttatcatgcattaccccagtggttaaccgtcgtaatccccgccacaattcacatcgccttcaatgaacagttcgcggttatcacgtaataaattatactttctttcgagttcaggcccgaacgcgtcggcgtcttcataccagctataattgtatcttccgcattcatcatcatattctggttcatcaccgcgctcgttgaagtgaacaattttaatatcgtccatccccagttctttcagcttatcccagatatacgaaatctcaacgctatgggaaccgaacgcttccagtgagatcgtaccgtcgctatcgacttgaggaacaccccacttcgaacgagtatcatcggtgatcatatctattaatgactcaatattattctcaccgtagatatcagcaacttccttttctttaccagggcgaacaagtccgatcccgataataaagctactgcttgagctattgctcacaaacccagaacgaattttcatcgcatcaccatattaccaatcatgaatagagggattagcgcgaagacgataccccatagaatgaccttatcttcacgacggtcacacccataatagataacacctccagcgaaaatcaatacaacaactgaaacgaacgcgaataaataaatcatttgcaggtatccattctcatagaaacttctttcaggatcttattcagatcgtgaagcgcatcttttacgttaccttcgttataggtaagcatatcctggtacagccctttcaagcaacgattgattacatatgctttttcagaaggtaacattgtaccagagcgattataatctctgaaaatgtccatcatcgtgccgttgttaccaggtaatgacgggttgaagttaaccataccggacatcaaactatcaacatacacaactgttgtgttatcagaacgatacgcgccaccaactttaaaccagttgctgaacacatacggagattcccgcacttcgctcaaatcggttccgatttcatcgatgtttacacgaatgttgttaaaatacaccgattcatcaatagaaccatgacgccataagatagcaccattgttatttttgaatccgactacatcaacctgccagccgttatctgttaaccggacatcatcaacgacgatgaaatcaggtagctgtgaatgaaagccgatgttttcaggacgggaattacgaaacccatcacgattggagaaataaaggatgtcgccttgattcagttcgcatatattcataagatttttaaagtccaattcaagtaattccacaagtcacctcaaagccccctttcgggggcgagatctcattagagtttaacttctttttcttccagaacgattgtgcaatcaaatttcacatctttccagaattccgctgcaacgatatctgttgcggtaacgcttacgctggtttcttcgaaatccagatccgcaaaccatgcgtgtccgacgacaataccgtacattacacgactcaggcgattattaagggcgcgaacctctttaatagtttcctttgtctgcttatcaagatactcgatcaggtcattcttgtcaagcgcttcgatctctttagatacggtatcgtaagcccacagaatgatcaggtcgccattgttgagtttcttcttaccttcggcgcgttttgcaacggtagccgcaacagccggaagtgatgaaacgcctttgattttcacgttcagttctttcgacatgtaaacatcagtcgattctgtgcgctcaaccttcggagagaagccgtaatcacggatcccttgctcagacaaccattcaccagccgcctcaccaaagcgctgtttaagcccttctgcgttgcgtaaaccaatcgcgttatcacggaagaacttcattaccttctgacggcctttcaggatttccagacggacgttatcagcaacaaattccttaccagaaataccgcgagtcatcgaacggttaaccagaggcagagaggtaaagtcaaccagtacagacatacggtcttcaccaattttagccagcggtttgatagtcagaccagaagcacgtaagtttttcagagtcggaatatcggtttccagcggaagtaccttaacgttcacgataccatctttaacaatggtaaagttacgcacttgtttggtttctactttttccggcaatccaaactctttttgtttgctttccggaatggttacataaccttgcagatccgtattgatggaaatgttcggacgggaactgttacccaccaggtgtttcactgcaactttcgttgtggtttgggtaaattccggtttccatacttcatgcgctaccagttgcgccgccagtgctttacgttcttccggagtagaagcgtttgcaatctgttctgacagtttatccagagtatcatcatctttctggacagtctgacggcctgtacgattgtacgcccagtgttcagaagacaggtcgatcacggtgtcggtttctgccaacagttcgagagcatcaaccaaagtaaacgcgttttcatcaggaaccatgttgtagtcaacaccatccatcagacgtttagccggatcaacaaccgcttcggagatcatatctttagcgttggaataatcctgtttggtaaagcagttatcgtatgctttaatcagacgcacatcacccagctttttcagaactttccatgccagatctggattcatggtatgaagcgcatgatacagaaccacatacagaacctgttcaccttctgctgttgccggatcgaagccgtcaacgtcattgatcgcgttttcacccagcgcccaaatgtttttgatatgttccggaaccagaacaacaccatttgcagcattcaggacatacacacggccttcatccaggtagatcgcatgagttgcatcgccaactttgacttcaacacgtgcggaggtttgcgcggtaatgatttcatcaaatgcaggtacatacgcatcaaacccttcaacgaatttgtgtaatgcgttggttgcttccgccattttttccagcagaggacggtttacataataaccatattccaggaaagcaatgttgttaaacgtcaacggcagagtagaacacgctttcaggatatcatcagtacgccagcagttatcataaccatcagtcaggaagatcagactgttcagattgccattatccgcttgcagatcggtagcgacttcaaccgccagttgcagaggttcaacgaagccagtacatccggtcggacgcagataacgatcgatagcatcattgattttgctcaggtcggatacagagctaaccttttcgcccacgaatacagaaccgaactgaccacggctggagaaatacagaatagatacggtatcatcctgcttaaccagcgttgccaggttgtttttcaggtgctgacgaatgcgcgggagttcgttatacatcgatccggatacgtcacaaacaaaaacgtggttagtcggggttggtttggctacggcgtttttgaattcaatgttagtgatcataattttctcatttataggtaaattttattaaaatttcgtttacttttttgctaatagtatctaatgcatcatcgcatccaaacttactactcaacaatgaaacaaaatcatccatcgttgttgtttgagactcgccaacgtcaaaagacagagcgtaggcaacaggatttttaatccttacgatttgaatagtatactcattcaggtcaaaccgttcaagatattttcgcaaagaaaataaatcaatcggtactggtagagtttgactaaacgttatttcttcccccagttgataggggggcatttttacacagatttcgtattccatcagtgatgactcttcatagtgtgttccagattacggaaaatttgcccgtgttcaagctgggattggaattctccgcattcatcagagtaagtaaattcataatcctgattgccaaatttagagttgtactcttcatacaaccacatcttgatcagagcgtctttctcttctgtttccagatcataccagtcacgcccatcataagcaagcgcaatttgaggattagaccgatatcgagtttcggcgctatcttcggtttcccattcataacgcttatcatcatagtatgattcgaagctatttcccatatgaccgcccaggtcgcggtgtacctgctgtacaacttcttccgctgtcgggcaagtcatccagctataaccacagttaggaacacagtcacccatcatttcgcggagattgttgatatcagtcggatccttcgggaaccgtacaataaagctacttgatgaactattgctcacaaaaccagaacggattttcattataatttctcccactcaaacgttgtgaaatgttttctttcgtcatacccaacagtacaacaatgtgttggctttcctgtgaatccatcaaacacagttatacaatagtaatgcaaagatggaagcggtgtatgcttaatgtagttgatcgcgacgttcaggtcaacagtagaacatacacaatcagacgtttgatcaaaacggccatcaaaaatcaactcaatgctatagatgttcatctttcacttccttcatatttttcataacttcttcaaaagttacggggatttcgttgtactgtagtgattcatcatcccatacatcgcgatgcccgaatgttgaactttttgcaatgagtttttcattttcccatacatcaatagtaacatgatcaccaagataagggaaattaggaactttgttcagcacatcaacacagttttgtaatgattcagaaacatgaacaatttcagtgaattcataatcagcactataagaagctacgtaaatcatcaccaccccctaacgatgctaatcaacagtaaacccaggatccagaacacagcaaccgcacaaatacgggccattactacatttccgcgactagtccactccgcactaaggaacaagagaacaaacgttaacgcgtataaaaccatttcaataacttcggtaatcatataaacctcactgaacataacgattgtagttgatgtgccacatgagactagacacaacatcggaaacaatcaaaaggaacaaaccagcaatcattatcaaaaggataactaaccaagtggttccgatattttgttttaacgacaatagcaaacacataatactgacaaaagcaaggaaagaaataacaagcatcacgattgaaggggccataatataaacctcacgaaaaagccccaaaaggggcttgattaatcaatgtccgaacacaccacgaatagactctgcgaatgcatacagttcaggatttttagcttttactgtttcgatttgctccagaatgtaatctggcttgtatttcgcaccgaaccagcagtaagagaaagagcgatcccacatgaacacgttatagtattcaccgttacgaacttcaaccatcacataaccaggattagaacccagcggataatctttcagaagattgaatttcgcgccagcaccagtacatccgttaaacaggtcattaaaagtcatggtatgttccttttgtcagtttcgtttcaacaaggtcactatactattcttcgttagcctatgcaagcgcttttttgatttgttttgcaattgcttcgatcaccggaacagatacagagttaccagcttgtttgtacgcctgtgttttgctcttatgcatcttgaatgaatccggaaatccttgcaaccggaaacactcgcgaggtgataacattcgagggttcttaccttcctgcaataccagacattgaacaccatccttatagtattgggctgttatcgtcccagtacacacagaatccaccataacggcctgataaccaaaccccttgccgtttgccttgtttcgttctttacgctctctaaagcccttccaggcacgatctgatatggtgtattgatcattatccggttcgagaatgtcaccgacccttgttggggtacgtggaggaacaggaaaactaaagaacactggatcgcgaaagcagacaataaacacacgctctcttcgttgaggcaatccaaaatcttttgtattcattacctgataatggatatcgtatccttcgtcctgtaacagcctgtagatggttttaaacgtgtttcccttgtcatgggttaatagctggggaacattctcaaagaacagcacagagggctttttagcccgtataatgcggagtatttcaaagatgatagtaccgcgaggatctaacatgccctgttttaaacctgctttactgaacgcctgacaaggaaacccagctaacaggatatcatgatcaggcacatcattttcatcaatggcgaatatatcaccctgaatattttcatcgccccagttatcagcatatgtttgttgtgcatgtttatcgatttcagacgttaaaaggcattcgaccccgccgaatgccttatcgaaaccgagcctcacgccaccaacaccagcgcaaaggtcaattattttcatacgtcgaaatcaacctcatcgattttgtatgattcttcgccaatatcagcccatagctgaatattcacactttttgcatcacgataaagagattgaccacaaagcccacctgtataacaagtttctgtaatctcgttaacttccaggcggaggctattgcgcataattttaacaacagccttttccattgccgaatctagggttttagtatcacccaatactacatctttaacgttcaaaataacatcactcattatcgccactccgtttcaattccgtgtttgtatgcgtcaacgcccagaggggtgatcactaaacacatatcagtatttttcgttggtgaactaaacgccattgatgcgtaacctttttgaatcagggaatcacgccctgatttactgggaacatcgttgaaatccaaatccaacatttttgacgagtatccgtaaagtttacacagaacatcaatttcagcgccggataatttcggatatgtcatttgtagtacctcacaacatgttcagaatacacacgttcaatgaaatcattccagaaatcgcgatcaacttctttcggataaccagatacagcagccagtttttcaacttcacacatcgttgattctagcgcctcttgtacggttgcgaaaggaacaccgccagctttaaccattttcaaaaatgcgctatccggaagaggatacacaatatcaccttctttgaaaatctgaatcaattgcataccaccgcgcaacgcatgagaaagagctttccagtcgatcccgttgttggcttctgcttgccgtgcgcgttccccgtattcatcccagagtttatacacggatttttcatttccgctacggtgatcgtagactggaatttacgccccagaacttcgtaaaattcctgacaacctgatttcagtgttttgtctgtaacgaatcgacaaaactcgttggtcgggaatcggttagaaatctcaccaactttgatgcgcttgccgtagttagattcatctacgttacccagcaatgatgtgccataccaggaatcaggaatcgtctgtaacacatcgacaacttcacgcagtgcagccaggcgagaacctttaacgccatacttcgccgcttgcttacgaacataaccaaacaggccagttagttccgtagtgtagaagcgtgaacggttagcgcggagatattgccagatatcagagttagcgatcagtttgctatcatctgcatgaagcatatcaatcgccacggtgtcaccatcacatgcgaggctaataaacttttgcagactgtaaatctgacgatctacgtcattaacaccgttctttgagtttttatcgccagttgatgtatcgatagacttcttcgcagtgcctaacaggatttcgcgaggatgagggagatagatccctttgtagtctttatcgcttgttggtgtttccagtccgtacaggtgagaaccgaatacggtttccataatcattttcatcagaattcaacctttaatgtttttgcgatcccgcgcaattcagcggtagtaatatccggaatgtttgttccgtagctattcccaaatacttttttaatcttatcacacaaatcgcggcgatacaccatttctttgtattcttcttcgctacgatacagttgataacccatccacccctcagcccacccggaattgcgcttgattttaatattagtacaacaatcagaccacaggtactgacgcgcaactttttgtacgtaaagggttttggggttgcgattttgtcgctggtcactacggatcccagcatcatacaacgtatcaccaactttcacatcacttaaatcaatcatttacgtctccaacaattagttttttcacagtagtgaacgggaacagacacgcccaacgtttctttactgcttctgttgtatgttatcacaatgaatcgattttcgccacccctaacacactccagatccaaaatctcgcgggttcccttagtgttcatgtctgcaacatagtattcttcgttgttgacaatcactatatccgacataatcaagcgaggtttcatgcagcatacacctctgattcatcaagccattccagattctgattgagtgattcaatcagctttttatcgcgtctggaaataacaacggtagaacctttttctgccttcgcgatgatatcaccagaagaagtgatgtattcaacctcataatcacggcgagggcttccgagtttatcaccagggactacattccgtttaacagattcatgggatttttcggtgaataccaattcattctctacatgggtaacaataccatcaacagcagaacgagaattaatataaattttgctaatttccgccatgaaaacactatctctcagatatcgagcagtcactttatctaaacactgagaagacactttatctccgccaggatataccgagataatcattacatgaccctgaacacgggcggttcctactttatgcagaatgtaaaccgttgaaccatcagaatctttagatatcaagatcacactgaatgattctttcttttccttccgagtttcaccacaggtaaaactcacatccagaaaatcaccaactttaacggcacggggttttgctacttgttcacgaacactaataacagggatcataatcatttcctcacagtttcaaattcttcatcagatttccaatatacgttaaaattacgacaatcatgatcggatgtcaacgtgtatttttcatttgttttttcgtcagtgataaccatagtttcattctcgatcgagttaacaccgtaaacgaaaacattctcaccacgtttgtttaaaaacgcatcacccttttcaatcaactgccaacaggtaacaggcaaaccacccggactaaccgggcgggtaacaagacaatagggatgtttaatcatttaaattcttccattgcataggaagtaagatctttgaaataccttgcggtgttgccttctgggttgtttgtaatctccatcaggataacagcactatcaactcctgctttcttagccatgaatgaaagggcttcggtagcaataatcgttgctttcataacatcagctttagaaacgttgattgtattcattttttcttccttttcattaatcacttggtatgtgtgtataatacaaaagccctcacgagaacgcaagggctttttattaaatttcgtataaatctggattcacaataaccgcacataaaagatcatctatatgtgcggcttcttgttctaaggtttgcttagatgaatgtgctttcaagcaacccccgtaaaggcgtttactatctggaaatgatcatcgaagaattccccttgtcgttgcacgacctcatgcataggtagccagaacgcgtctgctgcatcatcagcaccgcccatgatacgaggcaatgaaccatcgttattaggttcgagcttgatatactgtgctacagtcggttttgagaagtacaccgaacgtttcggatgatcgaacagcatcgaattacggatagaaccacgaataaccttttcaggtactttaattcgtacttcttccagcaattcacggatcgcgcaatcaaggaacgtttcattaccgtttttgtgtccacccggaagcgccaacgcatctttaccaggcgcaaacttacgacgaattactaacacgttgttattacatacgaccactgaatcagccgtgcaacagttcagagaatccggatacggatattttttgaacttgtcaatctctcgttgccagtgtgtatcttcatgggacaaacgttggaattcttttgtttgtgtccattcatcgataaaggaaaccgtagtgctaggcgcatattttaacaaatcttcgtcccagccttcatggtgttcccagataattttgcgtaaattggtcgaggacagatcctgatctccaaccttcacaggttcaaccggaatatgattccatccgaatgctttaagccagtaagaatctttgtctttttcgtacccgacgatcgcaattcgatcatttcgagtttcatcgattgccatacgaacacgggatttccatttttcctcgttatagaggtaatccggaatgtacgcgaatttgattctggctgcatcttcaacatcaagtttgcagatagaccagcgagtgatcattgcttgacgctgtttagcggtcaatgggtttaatgtgttcggatatgcataagcagaaccgatcagaatgtaaaccgtatcagcaacagcaagggcttcccttaccattttctcatgaccatagtgaaaaggttgaaaacgtccaattactacagctttatcatatttgtgtttcataacgtgctccacgtttaaaggttaatcataaaacagacgcaattatcaacacaccaaacaatccaccaacgaaaccaaagaatagtgaaatgagtatagtcagtacgatctgttttatgttcattatagtattctcgttttagatgtcaagcccccaaagagggggctttaaaacattatttacgagaatcgaaaatcactttaccagcataatccgaacccattacagtttgaggtacgccacctttatagcgggtagagtagttcatctgtacatccagttctttccagcggatcatttccggtgtaatggtgcgttgcagggcggcgttggcttctgcttctttcttcgctgcatacagacgggcatcagcatcacgttcgttagcgattgcagcgttttcacgcgcctgacgatctgcttccgcttgttttactgcttgtaatgaagtctgttctactttttgcagttcagctttagcagcgttaacctgttcttcgcggatcttcgtgttagttacctgttccatgataacttccggcagggtgatatcctgcaagaatacctgtttcacagtgtaaccgtaaggccgcgcataatcttctacttcctgctgaatcgcaatttgcagttggttttggatcttcgcatcaaacaggtcttgcgctttcggtacggatttaccaaattcgcgaacagtggaaagtagtttttcagttacatacttatccagtgcctgatcctgattacccgcgttgatacggttaatcggtgctttgctaccgtcgaattgcagcattacggtcatatccacagtggatttaaatttatcctgggatggaacctgtaatttgtcgaacttcatcgcgatgtctttggtgctgaacgtgtcgaacgttgccagcgggtttacaatgtggaaaccaggcagtacgggtttcggtgatactttacccatgaaggtttcagttttaaccgtaccgtcttgcacaatggtatacatgttaggcactaaccacagtgctgcaactacgcccagagcgatcagagaggttttcttcgggttgttcacgatagtgtttaagttcatcataatttccataagttgttgttcaattcgatagttattctatcatcacatttcacgctgtcaaactatttttaagaaagttttgtcagcttgtagattgtttgatagcacaagcccttaatctcgtccaggatgttcttcaaagaactatctactgattcgtagatctcgtttgcttcgttggctattttacggagatacgccaccgtgtcaagcacattttcggtttttagcacaggtttgtatcttcccgtgattcctatgtggatttcggtgaatttatcaaccaaatcctgcatatcttcgtaaaaaccctcatatgctttatgttgtgagtaggaacctgttgcaaaatgtgcgctatgcatatacgtaacggacataaggcacatgccaataaaggcatctatcttgcttgagttctcggattctgtaatttgtttaaatgattgcatgatgatccctttatgaacgatggatacttgcaaactcatacgcgaccctgattcctagctttgcgcattcggattcagatcggcattgtttttggtgccattttcgttccatgtagttgtagaatagttcgcttgtatttacgctgggagggatcgttgtgatgtatacttgaagggccgcattaatataatcgtcaaattctttctgaaccggacggtcggcggcgtgtgttgtgggtgtcatcatcaacaatccgaacagcacagccattgatatgcgtttaatgttcataacaattactcttttactcatagacccactataggtctactcctgtatatatttatagcaaaaacgaggccgaagcctcgttataatatttttgctgtaaagtcaatcaagtaatgtcataccaacacaaacttctttcgaaagcgcgtattttgttcacgttttctacgttttcatcccaaccgatcacaccagctttcatacgtttcagttcctgacgtaaacgggtacgtacttttgaatcaattttctttactgcaatagaaagcattgcattcagatcgccatgagctttgttaccgtcgcgacacagattattatcaaatcgaatgtatgcacatcctgatttgtgtttccagttggttgagtaccaacgcaacccatccggatcaatgccatgttgagcataataacgagaatactcttttacttcttcgatcttttcgttagatgaaaggtcacgaagaggattgtatttcttacggtaagtgcgactcataatgatctccttttgtttatgcttccactgtatcagggttgttctttagttgcaagtaatgttttcgacaaagtgaaacatatttgtcttcggccccgatctcaatctggtcgccattagcaacaaattttccatttgcatcaatacgggcaacggtagttgctttctttccacaatgacaaactccccgcaactccctgatctcatcagcaagtgccagcaacatataagaaccttcaaacaagttcaactgaaaatcggttcttagtccatatgtcattacgggtatatctaattcgtcaactacccgacacagatccatgacatttttcttggaaaggaattgtgcttcatcaacaaacacgcaagaaaccagattctcgctatcactgtaaaaatgattgttgtgaacatcataatacaagtccatatcaggcgtgatcatggtgcatgttgcttccaacccaatacgcgaagagatactctgtttaccttctcgcgtatcaattgctggtttgtacatcaggatccgcataccgcgttcctggtagttgtatgcatcagtgagtaaacgagcactctttccagcattcattgatgcataatgaaaatatagtttagccatttatcctctcaacaaaatctggggtattttggaatttcccttccccttcatggtttttgcatgttttatttgaacagtagatccaccaatcccactcatcataagggggtttggtaatgttcattacacaaattaaagggaaatgacaatcccgacagcgaacattttctataatgtttgcgttagccatgcgtataaccgcccatttcgctatcttgtgcttgatggatatcaagataccacatattgattttgcttttcagttcgcccatttctttatcaagcccactgtcaacaagacagagaatgtcaaccaccgttttacgctgggtgatgttgattttgttcgctttcatcgcttgcgccaatgcattacaggttttaaccagtgcggcgcgttgtcctttgattacggcgatccgtttgttcgctttcttaatctgccgccctgctttgataggatccatcatgattaattcaccttacgaggatcgaaatgaacgacaatgatcgggtaatcaccagtcacctcattaataatgcgcttaatgagttcccagtcgcccccagcgagtccagcaccgattaaaggtgtgatgataggctttccagtcttaacggcgtcagcaagccctacagcctgtttaaacgcattgccgattgcgtcataatcgacacgcggcccaggtgtccagaaatcatattgagtatatgcattgaaaacaatgttgcctttttcgccaatgtaaacagaacaagttccgagcttatcacgggaaccttttaacgtgttggcatcaacttgaaatgcaccaggaatacgatcgcggatttcgcgagcaataccagcacccatattgcaataacagttgcatccgtggatcaaatggccttcaccattcagatacatattcacagcattacctttcacttctttaatgatcatttttattattcctatataattcgcgttcgattagcatatcgatgaaatcagtaatatcatcaaaccaatccttagtttcttgagcatgagccaaatcaccatcatctaaaaacttttcgcgagcatcagcaaaattatctagtttgttatagagttttgctttgtctatatcattcataaattaaccttaattattaaaagaacgtaagaaaaatacgtaatgtcacacctgtttacctttccgttcacggcggcgatcttcttgatgacacatatataaaacaccaccaaaaattataaaaccgataacaacgcctataaagtatccagcactaaacatagtcatcatccccgcaatagtaacaaggcccagtactctcatgtttaccagcattgtacgccaagaacaccacaaccgccgccataataataaaaatccagatagccattagtaaagccctataccagcattgaattcatcaaccaaataagtgcggaacttttcacaccgttccttatttggcgcttgtttgcatagattcatcattggttcagactgcaaaaactctttttgtttcagcaacttaccgcgtttatacaggtgagcattttcctctccccacatataagcaacatctaactgttctgcgatcacttgcttacatactgcgacatctttgatatcacgattgttgcataactcatccaggcgagcatcacccgcgtgagcaaatccagcaaccagagttaaaagcagtgctaactttttcatgatgattccttattcatcctcttcgataggggtataataatgcgcattgcagatatacgcaagaacttttttcagagacatatcagagaatgtcggatcctgatttcgtctcatcccactaccagtttcaacagcccaacgtttgttagctggattgtatgtcagccagtagcaatcccattcagacagagtatgttcgaacagatcgaaacgcttacgcccatttgcttgcggccttacaaaaggttcaaccatttctaaagcggttaacactcgattaatgttcgaaccgtcttcatccatcgcaatccgcaaacagtattggttaatgtccggatccataccatcgatacccaggccgatagattcgaaaaattttgtcgccgcgtgataagacacactagaagaacgatattccaacatcacagggatcttttccccgtccttgacgttgttaatgatatcctgatcgataagttcaatcaggtctcttttctccttgatcaaggtagaaatttcttcttgcagcggggctatcttcgcatgaagttcttttatccgttgatcaattacggacacttcgaaagctaaatttctcattgcacccattccccgtttttgtcgatgtacatgatccaatcagcaaccgcccaatgggaagtattgcctttcggagtcgctacgatgtaggaaccagctttaaacagtacgcgtttagtttcgttcaggatcaggtcgctcataatgtattcctctcaattagatgcatccataataaaaaagcccccgaccgaagtcaagggctttttgtcaaatgatttgtttttcttctaacagcttcgcggttgtattaaccatacgagcataatcacgggcttctttctttgtatacttgaaaccagcgttatagctcgccagcgcctttttcaagtcgcctttgtggtaatcaagccagtactctagttcatagatcgcatactttgatccaccttgaagagtttcgagctttttgattactacgcgtttaggatatgacttatccattcgtgcgctggcgctccttgcggtaacttgccagcatccataagcgtgatggccctttttacctttaccgacattctcacatgcgcgagactcgatccaggcaatagccgctaaatgatagcctaaacgtttagccttatctttttctacaggttttgcagtcttcaaatcatagttgtgtccaactcgataagcatactccagaacctctttctgcttcggtgtgatgttatccaaatccttgatgtaggatggagaatttttgtttgccggaggcttcacagtagccttttgtaaaggcaattgatgagtaggcaaatccgcaatgaaatcccctagcggatccgttgcagcgttgccagaaaaagagcacaagaaaatgctggcagcaattataattttcttcattttaatacctatgttgcaaaaagaggggcaataatacaccccactttatatttatgcaactattttagatagtttttgcgtcacgtagtttatcggcgataaactcagcaatgttataatttgaaatagccttgttaggatcgtatagtgcaatgatttcatctaacgataccataacggcatgtttaaagtagacgctccagctagtagtaaggatctcgctgttgtcaaatccacaatcagggctgaacaaagcgcggtatttgtatccactgtatttcgtcagacgattcgtgctgtgcgcgtcactggtgatcagaaaagttccctggtgagtttccacaacgaaaaagtatccgaggcgttctttgttgtccagcatcttttcaaacttgcgatcggtttcttcgcgaacaatacgagaagtcagcatttccaacactttatcgtattcgggccaatcattctcgatcacgatcgcatcaaatggtttcttaccattaatcccgcgcccgatttcgattttcgtgcaaatttcgttgaacgttttcaaatcttctggcgtcagttctttaagatcgctcaattttgctacataataacgtttttctagtttcattttacggaaacctcaattcaaaaataatttcacagagttaccacatttaggacatgtgataaattttttcacaacataatcagcagcagagaaaaatccattgtaaatcgcttctctcttttgctgtatatcagatagttcatattctaacccacttttacagcaactgcaaacagtaattagttttgggttatggatgacagtaatcatatacacctcacaaaagggggctttcgcccccatcattagaaattgtcttcgacaaacgccgcgagacgggaacgatacactgtatcaagaatgatatggcttgagtgttcgtattctttcagcttttcaacagcccatacaaacccgttgtttacggcagtgtttcgagggttgtcgatctgcttaatgttcccgcatagtatcagaagtgtgttctctccgcaacgagaaatgatagatttaatttcgtggttgctaaggttttgacattcatcaacaatcagcacagaacctttgcccggatccggatgtccgatactgcgaccacggaagtaatacaggctagggaattgaaccacccctttttcaatcaaaccttcaatgtatttttcagattccggattatccttaaacagaatattcaggctagtaatacaaggttcaatagaaggccggagtttttcgcccaatgtaccaggaaggaagccgatttcacttgataacgggctatctgacttcacatacatcaagttagcgtaatgtccactattaaccaggtgcatagcaccggaaacagcaagcattgttttaccagaaccagcgccgcccataatggtagcaacatcgatttcattgctcataattgattcaacgaaagccgcttgcagagaatcacggggttggatagctttcatgagtttgcgtttcatagcctgttcatgcttaacaggtaagacattcaagcaaatctcatcagcagtcaccacacgcccgactaactcaccgtttgaggtaatgtactggttaggataaaaatcttcgtcaggaagcgaactgtaagtgatttgggctacattatccgtatatcccaacacttctacggtatcccagaaatcagggatctctacataaccggaatacaatacatcgctatcttttaacgtatcgtcgccagtatactgttctaccttacacccacgggacattgcgatcagcaacatcataatatcgcgagtaactaaggttgcatcctgttgcatacaagtttcaatgattcgttcgtcttgcttgtcaagagcaaacgttttgtttccgacataatcaaccactttaagggtgatagtgtcagacagtgctgggtttgtcaggtttaaaggaatacctgatttcgtaatcgcatcatatgactgaccgaaaataacttttgacagaagccggatcgccaatcgtgcttcgtgcgctgttcgttctttcgttttcaggtgatctaattcacccatagtagcagaggtaataatgatttctgtaccaggttgagtgaatgaatagattgaataggggttactaatcaaaacattggtgtctaatacgtattttgacatacattaaccttatgtggtttcgttaaaaaatgcaccgaaaacctcttttgctttccggttataaacggattttgcttcttctggagtgttatagtaccccaaaaattttctttttccatctatgtttatctgcgctttgtacttcccattggctttatgataagaaacacctttcaaccctgtactactgtttgagttacatttctttttcatcgcattttgctggttcgtcgctttctgtaaatttcttgctgtatctccattctcaacaccatatacatgatctacgataggaggaagataaccattctcaacgtaaaacactattcggtgtcgcaaatacatagaacctttaaaatgaatttgggaatactcgtttttgcttccggcttcacttccaggagacatagggccgcgctgaactttctaatacactttacctgtagatgtatcaacatctacaaaattcagaagagattcgatcccttgaatctcttcatgtatggttcttgatgaatagccatgacttttcattacatacccagcgaaattacgtgaatatatgctaatggatgtttcttttgtacacaatgcatgagtgtattatacacaatgtccatgcgttcattgtgtgtgagatcgcactcatcaaaaataaggtttattgcctggtgctctattcgacgtccacggaaatgattaagaattgcccctttactggtcaatacatcacatccggtagcaccatttagccgtttggcttcttctgctgcatttaacttatgcgctacgtaaatgttaagggaactatgggaacgtttcataaaatcaaacgcgcctttagtcttttgtgttcgtctacccagatccagcctggtttcgaataccataaaatcgttagggccgtaattatgcgttggttcttccaactctcgcataagatgcatcttacgacattcttcaattgtctttacataaaattcactattcatgttttacctttaaggggccaaagcccctttgttacgctaattccacatgcggggcatcaatgaattttgtttcgatcggaaggttcggatcatttttccagttgataccaaaacgcagtttaacacccagttcatcacctgcttgtttaacagcattcaggacaggcaaccacactttagggtttgtttgccagccttgaggcaacacgctaggatacagatccaccgcatcacccgtgatgtgttttgagttcattgtttgagatacacccttacggacgttctcgcgctgttgttctacagtacgcagaccttcacgtacaccaaaatcaacaggagacagttgcagagcacgttctacgactttcaccagttgaggtttaacgcctttaaggttgttaaggcttttttgactgaatttaaacataaaatcacctcttgtaaaaataccctgtttgggtacacagggtatttatggtttaagaggttcgataattaataatcgtaaagatcaccgaagcattcttcaaattcacgtttacgttcaatttgctcgtttctacgctctttcatatcaggaggaagacggttttcattgacttcatcaatgtaagcctgtgcatcctcttttgttagaaagaatgcatggaaattgtatccgttgtacccgttcatactacgatcttcaagagagaattctgtgtgacagtcccagtctttgtacagggtaatacatttagcaaacagcccaataccgcgatgaatgtatgggaatccagtaacaatcatcttgctacccatttccgcattttctccgttcacacagaatacttcatacatgatcgcacctggtttaacatctttcttaacagcacgtttttcaaaagcacttttcataatatattcctctcaattggtgtaactacagactactagtttattttctgaatgtcaacaaggtttatcgttttttgacggaaaagttagagtgaacaaacgatcatgaaggttgtcgatccgttcacaagcctgtttcagtatggttttatcaccatcatttgttgtttcaatgcatccaagttcatcggcgtcaatgttcactacgtcgctcatcaatgaagcaaacacgttagcatcaggatgtaacagttcttcgatttcggccttcatgccgtcgtgttcagaaaggatatcaataatatcacgggttaaatctccctggtacgggaaccctgtttctaaatgattgatgatcctttgtgctttcgtaatcataattttacctacaaaaaagcccctttcggggctagttaattaaagttcacagcaacggcacacaccgtattttgtaaatggagcatcaccgctaacgtaggcccagaaatcacatgcttcttcggcagtatcgaagattgcggcatcatagaacccgtgggcttcgttaccgttctcatcgatgaaaaccggagtccagatattaggattgaagcaatcgtcaacaacaacccaaccttctttagctttcattgcttctttgttggcttcgatgtgagctaagatttcgttcatgatgtccatttttctctcctaaagtgtgtttcgtttcgacagggctatagtctcataaccccgtatctacgtcaacacttatttgaagcgaattgtgctatttttgaaaaatagtccagagcacacagcaccttcaattttcacccctgtagggcttttagcaacgaaccctgttgcgtaggtgtctttctcatcacatgcgaaccaggcgtggcctgtgtacgtgatatcgctaaacccgttagcagtcagaatacgttcggcttctttctcatcggtgcatccggattgtgctaaaacgacaataacgacaataacgactaacaccaaagcaataatatatttcatgttaaactctttttaagttggttttactggcttcaatccagtacacgggatcagaatagttaccgcacatacccagtaacacagttgtacatcctaaatgatcggaaggtctcaatccatcaggatgaaaaggcaattcgttaacaccgatactggtagcaaaaagagcacctccagtactgtaaaatgttttgatatgatcgtatgcatcatcaggccactgaaaacgataagttttattgtcaatggttactgtatacatatcatattccgtaaacaacggatcttttccttgtgttgcaccatacagagcaccgcgccattcaaccagatttgcttcaatgtcgcttacacaaatttcgttacccatacgcaaatcatgaaggatctcttcaatggtacgaatagccccgctaagttcattagttaacatagagtttcctttaaattggtttaatggttttcaggtgtagtttagcataagaagaaccaaatgagttgccattatgatcaaacttatgttcttcactcttccagtatttccctgatttcatcaagggtatacgcttcttacctgctgttatcgtttcaaccattccggtatgagtgaatatcatgatataccctcttctttcagcacttcccagatcaggcgatccaggtgcatcagattccacataacggagtcatacgaacccagcgagcgggagtaaatcactccccatgaacgataagccttttggaatgattcagcactattttcatcgtgcggcatatcgtcaccagaagcgatcaacagtttcagaaccatcaggctattgagcgcctttggcgtgaattcttgttcgcttaacttcatcgcgtagcgttcgatgatcgcgattgacttcggatctttaatacgcccatctgtacggcgcgttttaaacgcgctcattaattcatcgactacggcggtacacttcatatgcttcatccttttcctgtacagacatccgattatagcggatctcttcgcgctgttcaacttctctcactgcttcggctttcttttcagcggtgagtatgtgatgtactacagcgtttcggatttcccagagatattcaatcatctgcatatcttcaacggtgtggtagcctttcatatcacattcaaatacaatttcatcgcgttctgccattgccacctgtgcggtagaaggacaaataaccattccagagtatttttcaatcaacgattccagtgtacgcggttttgctggaatgtcaatagataccggaaccattcgcatcgttgaatcattatgggattggtaaatcatcagaatgtgatctccgcaaactgcattctacgctcaatcgcatggatagcgttatcacgctgttctttgttttcatatccagcccaggtaatcggggttgaacagatcaggtgaaaagtgattgctgggtgtctcttcccttcaacaacgattgttgcatcatcttcgatccaggttacgtgatccagattcaccggatagtttcttacggtagctgtttcgccaaccaaaggcgacacgtccagaatatcacgatcgcggacatatgatttaatacgagatacgattaacattatttcaactccactgcatatacatcggtttcaggggctttgtgtacgcgcatatctttaccacataccgcataagccggacagttacggcaaccgttatgatccttgttgcccgtcagttctttacggaactgttttgttttcgggtgttcccagatatccttcacaaaatcttcggcttccagaacatccagaccttcttcccagccaccttcaacccagcgttcggtaaacgagcaagggaagaactgaccacgttcgttgatgtaagagctaaacatcgtcgcttcacagtcttcggcgtattgcttgtactgttcgaagttcgggtgtccctccatcgcttcaacgaaagcgggggctgaacagctatcgaatccaaatcctacaccagaatcgaggcaatattcaacaagttttttatactgttcgcgggtaacggtgtcccagttcttaccgcgtcccttttgtttcagacccaggaatacgatcgcgttaacttgtttcaagcgcggatcattctttacagcatcaaccacgttaaacgcgtcatcataggttttagagctaaccatgaaatgaaggttgatttgctgttgtccggcttctgcaagattagccactgaattaaacgctacatcgaatccagcatgtttgtatactgataccgcaacagccccagcaacagccgctaaacgcgctgcaacgtcttttgatacatcagcaatggtaaggtttggtacaatgcctttagaacgcgcataggccatcatatcaaacatatcagggtttgtttgtccctgtgcatcagcaccgagggcgcattgtgttaaccagggcattttatcaatgatagatttgaatgtatcaagatccatattgaaaccgttagggttattagacttgtagcagaaaccgcaaagtttaccagcagggccattgcatttagttgtgatctcgatatcgagaatttcggggaatggtgcgtattctggatcgtgggaatatgttgcaccccagcgagcgaattcacctgtatcaacgttgaaattatagttgtagaacttcgagcgagcgaagcgcatattaccgtgttgatatatgaacagggacggcgctttgatgctggtaacgatatcgacagatttcataatataattctcaaaatttaacgtgggattggaagacagcgcgagcaaggctttcattgtcgaacggtatcgactggtgttgcgctttgctgtcaatgttaacgcgccagaactcactagaaccgtttttcgtggagtaatgcatcagcgttaccgttttattcttttccaggaaggtgcgtttgtcaatctctgttttgatttcgtgttgcatcattttacactccgtttcagtttacgttcgtcagccagttcttttttgtacagtttaatgtacttcccgttaagggtgcgaagctgttggaaaaccttgttgcacaaagcacgtttcgctttgtattccggcgtattacggattgattcgaccgtcatacccatttcgtttttagggtacgcgctcaactccctgccgatctctctgtgccagttgcttaactgatcacgctgtgctttgtactcttcaaaagttaacataacaatctccggtttcgtttctatgtgtgtaaggtatcattaccctacacacaacgcaagcgattttattttccgtaaagaacacaatattctttatatttttcacgggctttttcttcattactaaaggaaactcccgttccaaaatcagaaccttcgaacgtaacatcccacgattcatacccatcttccgaataataggaaagtgttattttacgatcttcaagaacaagttgttcaacaacaatatcaatttcagtagtcatagttcatttccataatcttttgctgcatcttcgggggttgcattcagtctgtaaagctcaacagctaacggactgggttttatttcgcggttcaggatctcactgataccgcgaaggaattctatataaggacggaatctcatttgatacgtaccgcgttaaaagcctggttgcgcagttcataagcctgttcaagctgttcagtagtgaacagaggactatcagtgttagtggtgaaactgcaaatggttttgttgtcggcgttgacttcttcgacaacgatttcataaccccagatcccgctatactcacatttcacgttccggtacttgatgtaaaccgcagcaacatcttcttttttgtagttccggcttttgtagatgatttccatgatttcctccttcgtttcgatgtgtgtacaataacagatcagggttatcgagttttagcaatttgtgctaattatgccattttcttagcgattttccaggaggctttgaacgccggaacgtcttcaatatcaatccagaaaccagatccgaaaccatcactatagcaagggcaaccgtcgcagtagttttcccaggtcatcacttcaccaccaacagaagcaccagtttccatagcacgtaatgcatcttcaactttttccaggttttcggcgttgtcgtcgtaaatgacaaagtaccatttaccgttgtattcgttacccagtttgattgattcgcgaacaagtttcatgatgatttcctttttgtctgtttcgtttctatgtgtgtaatataacaaaaaccctcaccataggcaaggggtttttttgcaaaaattatcgtttgattggggtattatctataacccgttgaatttccgaacgtatcgtagaatactgacacaattcggtaagcgcccgatcccatctacctgactatatttctggaatatgtaaggatctgcacctcgatagccagttgcttgatgcttacactctcgtttgaaccatgacattaataatatccttgtacgttgaagcgatcacataacaattttcttgtttggttagtatcgctttggatagaatgcaacatagcgctgatcatgtttaggttattttgcatcatttccgcgctcatgagaacttccatacgcgcacgtaagcgtttattttcttcttccaactcaaccatacggtcatatgctttgatgcgctctaagggcatatcaggacgctctttgagtacgcgagcacgttcaacctcacaagcatgatttgctttccagtggttcgattccgcttcaaatttattaaggcggcggatctcttcaaccagctttttgatcatgtgtggatccatcatgtcgatgaatttcatcaagcaattggattttgtttggttgtcagcaacagaccaagacgaattatacgtaaccgtaaacgtgcggcccatttcatcaacaaccccgatcttgttatcatcggtgattgtagccgcccatttatcccgcatggctgtacaggttccactggcgacactatgcaacttgtttaatgttgcgtcatcaaacacaatttcatcactcatgtatgcctcacatagatttcaaaatacgcagaagtgcgttagtaaagatatcaggaacacaaccaccaaacaacttatgattcatcagcgctaatttcatgctgtgattttcagtatatcgcccgttatggatcccccaggcaacgacattaccaggttcatgaataactaagttagtgagagtaacggtcatgcgctctttatcattgatagagaatgaatagcagtaaccggatccgatgtcgccgtaaaggttaaggtctttcaatttcccttgctcatgcaagcgtttcatatgaactgcacatgcatgattaatagtcatttcgtcatccctagcccagtcatcaataccagaggtataacgaatattgaaatagttagtcagttcatttgatacgctcattagaaacctcacttttataaaattctttaccagacccattacagctactgcatttgggggaacggttgctatcataccgccccgatccgttacatgcaacacatttccttaatttccagccatacacgaaccgcatataataatcagttcgtgcggccttgcgttcgtggaaattcatgctttgtaaacctgaaccaaccacatttcgatgttaggcgcgtaagtaacgtttaccttatgcatagtgcggtatttgtaagcggctttgtatgcatcgagttcagtcggaacacagaaagagaaaccgttgtcatagcgttctgcgttagaaacttcacaaccaactacagcggcaatatttttgttcatgttcatggtgttttcctttctctgtttcgtttcgatgtgtgtaatataacaaagcccctgcacgaatgcaagggctttttgattattttggtagtttttcgatggttgcttttaactcattgattttattaaagagttcatcgctatatttcatcaactcactacggcgcttttcggcccacttgaccaggaattcaggagaatctacaccatacgtgtaaccttctgcactcagttgaatacgagcacgggaaccataatcaacagaactttgttcaatgagaaacttaaccgcatcaagcagggctaaatcttcatgacttaccaatattccttctgcctttggaagatccacaacttcatcctggatgagttcacggcgggttgtttcttccagtgtttcatgattctggatcatcgtttcgaccggatcctttgccacgactggtttgttttcacctacttcttccaaaaacatcaacatccatccaggaattttagtccggaaagaactttgcacttcactggtgcatgaatttcccagaatgtggatcgcgttgccatgcatatcaactttattgatatagataacgttctgctgttcctgtcggttgctaccataagaaaggaagcggcgtaacgatgtgttatgaccgtacttccctaaatcaattcagccaggcaatcaatgatcccacggttagaaaccttgtagcgcttaccctgtttgaaaaataacggttcttccaggtgagtaggggtaaactcttcataaagaacatagaattctttaggaattttgcgctgaaccagactcagtttacaattattagaaggaacgataacagagtgaatgtttccttctgtatcacacatagcttgcattacttgcggatagtaaagatggttcttgcaagtatagctatggatacgactctgacgttttttgaagtaccatttaccagtttcaaaaggcgctgttgtaaaattcattttgcattctcatacatagttaaaattgcttgcatatgttccggtgattgtggaacccctgcaaagttcactttcaaaaagaaattcaaccgatcttttatgttgcactcatcgagtccaagcgctggcaatgaaatgttttcaaaagcacgttgttcatgtctttccatttcaccccaaaacaaacgggaaccgttaggcatcggtattccaatttcattgttccagaatttcatgatagttgtcaagcgttgttttccatcaatgacttctacccatcgagattcgttgaattcactatcaaccgcgatcgcaatgataccgcaaggaaacccagtaatcaaagtcttcatgaaagcatcttgctctttctgcttccacacgtagggccgttgataggacggattcagatccagatcgttgttcttgaaccagtgaatgtaactaccaaccatgatcgcatgatcgcgactttggaaagtttttaactcacgaatacggtttcttacaatttcgtctgtcattataaaatcaccatccagtatataatcgtaatcataaccgctacagtgaaacacattgcagcatacacacgcgcattatgaacctgtgttttcaattctgcgatctcttgatccttttcgctttcaaactcttcgcgagtaccataatacccaggatcgttagccgttgccaatctaaccgcatctttttcaaccagcgttgcgtaaccgctttttatttgtgtcgccccgtaccatccaccccgatcgttgttaatgatcagatgatcacctttttcgttatgctttgattcgccaacaacaataacccgcttaccattcataatatgatcctcaaaggggccgaagcccctatttcgcgttcttctgtagataatctaacagatttccgctttgatgtaaatccaaaactttagaaaacttctctgcgtttctttcgtttgtaagttcgtcgaaatgccatacaccatcatcagctattaacgcgccaggtgatgaacctgtttctacatcacgggaaagcgcaagccccagagggtgtaagatttcgcggttaatgcgccaaacaaggcccatttcagatagagtattaaaatcgacgtatttcatattatgcctttggtttcacaccgtaggccaacataccgaaacggtgatcattatctgcatctttaaacagaacttcgttaccatcaatgcagatgacctttgcttccggatcgatgtatggaagcaaccacaaagggatcaggcgtaggccgctatgttcatcccaacgactgaaattgagttcttccagttcatcaagggaaagctcattaggatcgatataacggaaccatttggtatttttgaggcggtcggggaagtttacaatttcttcatagccgaattcagcactccatgaagagtaaacagtgacttcggatgctttggttaaaacagcatcgcgaattgatttgcagatatcgattaaagtcagttgattttccatgatatatttctcatcttgctaaaattttaggcagtagttgccccatcgttttacgtgcatgtgacggaatctgtgagatcgggacatatttaaaatcatccatttcacgtatagtccgtccgttcttaacgaaagttgatgcacaatagcattcttccgctactgggtaatcttgccctacatagaggaataaagcaaggttttttgttttcgtgtaatcgagaacacccaggctaaccaattcctccgcgaacacttcaaatcctgtttcttcgaagcattcgcggatcgccgcgtcaatatgagtttcgcccttttcaacatgccccttcggaatatcccaatggggcgtttcggtggcatggcccatcaacacggcaccatctttaacaaagataatacccgctgatagttccatttattcacccgcaaaagcgttatcaaatgcttcaagtgcgttgttagcgcgagcactggcttttgtcacaccagcctggagattttcaaagaaggtatgtttccacacttcgcggcgactggattcatgttccagactgtttttgtgatcaccgcgaatctgttcttccatgtcataacggtacagatcgagttctgcgtttaatttctgttctaatgtctgtgcaaatacatgttcaatattcattttgtatagcctatttcagatttaaggttttcgagggtggagtgataaacaacattcccttcgtgtcgagtataccatacttttccgttctggttacactcattcattactttttcatctaaaccagggatcggcttcatgctgggagaaaacgcgatagacatcatttgttctgcactatcagcaaaccaacaagggaaaacagatccagttggtttatcaagatacatcaactctactttagccatagatttcttcgaaatcctcacaatcaggcaaatacgtttcacagaaggtgcaaagcgtaaagaatgcaggttgacgaataccaggattatccggtagatacatccagaaggtgttagcaaacacgatgaatgttttcaggttttcaacggttacttcgctgataccatcataaccggattgagcaatagcgcgttccaggggaacagggtattgctggcaatagtcggcgtaatgttcactcaataccattgagttagccgcttttacgagatcgataattttcattcgatataaccccaacgaatttgtacgttatcgatcgatgcctggcttgtaggagttggatacggataactttgtgcttcccacagataaacaacagcgtgttttgtcaattcttcgataacttcatcgaaagtcccgacacaggtttgtaaaggcaacgcgaaaggtttatcactggtttcgacttgagcaatcggcccatctaccaggatgacgcgaaccgttgtatgctcaatcatatgagcgtatattttgtttttcatgattttacatattccactttaacaggtttggcgataaggtgatcttttgtgaagccttgtccgtcgcaaacatcacaaacgattttgaaatcttccatttggtcgacccatccagaatcaggcaatccagaagggtacgtgttgaaggttttaacactgtatcctttcccatcacacttagggcatttatatgggtatttcgatttgatcgcactatacaattgacccagtgtggtcgaatgatcaaagtgtataacaaatgcttcaatgtcagcaatacgcagttcgtttggcttgatcacagtaaacacatttgaaggtatgtttgagcgcataatatatttctcacttaaagaattttttgatgaaagagaggaacaggccaccgctaaacatgatccagtatccagcaccgtcgccatgaaacaggacgtaaaccgcaacaccgtagcaaaagagttctgcaatgttcagtaagtttctcataatcccctcccttttctctataccaggtattttaccagaatatagaccatagtcaacaacaaagttttatcaacgatacgatcaccagtcatcagtagtcacccataggttgagaagaagcaacgctcaatacgcggaaagtgcaattgttccattcacaataagtttttgcgcaatgaacacttcctttcataacaaacccgtttgagaaaattaaccagtaaagtttcatgatagcctcctttgtttcgacaaggccaatataacaaagcccctgcacgaatgcaagggcttttttcagtttttcaacatccaaagttgcggaggacaatctttagaagcgattagacgatccaggcgggacataacccgacgataaccgtcgtattcaaaattaatttttggtggaacgtagttgacctggattgtttttctgttagctaaagaaacatactcagggatcaccgttcgcaaccgtatagcgatcactggcttctcttcgccttcgttaaagaacatttgaacagttataggacaagcaaagattttaccatttacccgacgataaacaataacttcctgtgtcccttctgttttggccttcaccgcgtaggttagaacataacacgaataatgatttgctagactcatcatgatatcgcgataagtttcaatatcttttttaatcgatactgaacggtctttaaagcgatctgcaatgtggtcagcagtagccgctaccttgattgtataccagtcacctaacgcgctagtaaacgcctcgctaacttcttttcgtacactgttaacaagatacattaaacgtgttctgttcatataatcctcactgatttttgaagtattcgatctgacgcaaacgcttttcagcggcggctttcgaatcgtattcaccaagttcttttgtgcgatcgtgattcaaaacaacccacttatcgccacgctgttcaatgtgttctgtaatatcttttaacgacttatccagatccagtgattcagcctcttcacagataatagtcaaatccacgggcagtgtcaacaaccttttcactccgctgatatcatcaagcatcgaatcgtatgcaagggttacgtgcggtttgtaatccggataatcgtatgttgcgccagcatcaatagaatctttgaaacggctatgcaggtattcagattccaggatccctacgatagtgctaccgtattttgtgtcccacttttcaacatcaaccagtttagcaggttctgtgatgtcctgttgcgggaacaaatcaaccgttttccggctgtatacgatcgttgtatgcatcttttcggctgaaacagcattctttgtgatacctaatgtcttttgaacatttttcaaagcctcacatgaagcctgatcgaatttagcacacatgtagataccaggatctacaacaggttttgtgatttcaagaaatgatttcataaaacaccccaataaaaaaggggccgaagcccctttgtaataaatttgtttttacgcttcttcgccaaaggcggcttcatcttccgcgcctttttcgacttcaacggaagggatcagagcggataccgcgccaatcactgcttctggggttactggctggcttgcgtcaatacccagtaccgaacacaggtcggacagaagttgacgatgaaccgacagttcactttctttttgcgcgataacttcgttaagatcgaatgcgcggcctttcagtaccagtacttcattttgcagtttttgaatatcagacattttattacccattgttaaaatttaaaagtatcgagcactttgctctttagttgtttcaaagtaccttcgttagtgatgatactatctccaggttgaggtgtcaaacctttttccgtggaatgttcatcaacaattccggtatcctttacaataaacacaaacttagcacccaagcgtttcaggtatttatattcgtgttcctgacgacagtcagttaccagaagatgattgtattcgtcaccagcatatttattgacgaatctttccagtgtgtaacgaacccaaaccgtgttatcatacttgcatacgatatcagttccaaacacttgcatcaagcgtctgatactccagggagtatcgttactcataatcagattatcaatatcatcaggactataaacaatattgtatccacgttctttgaggatttcaagcccgattttgaaaatatttagaacatcttcattagacatcacaagaggtttctctcgatcaccttcgtaaaaaatagcatccggatcagaatattttccttcaaccagactacgaatgtatggtttagcgtaaccatatcgctgcattgctactcttagcgttcttttgataccaaatgccagtgcttcacactgaacatcattgtacgcctcttgaataaatttagcaaccgtatctttaccagttcgcttttttccactaatcacataaatcattagctcattctcttttgagaagtgactacttttccgtcaatttcaacttccatatgaaggaagccaaaagttgccatacacgtaaccgcttcatcactatcgttagtataacccaattcaacctcacccaagtttgttgggaaggcaccataaaatctaaatgtggcgatcgttttcatctgggagttatccaggatatgcacagcgaatgattgcttaggatcatcccacgcaacagagttaaactcgttgtaatcgtttgtgctcaacatccatatgtaaatcccaagatacgatctcatttcctcatcgactacaaagcggatcatcaaaggatcaaactcaaaagccgaaccaggtactttacctcgaaccatcatatttgcaggaatatcaactgctgggaggttcattgatggtagtgtaaccccttgaacttgtaaagtcaaacctttcatgtaactgttatcaggaatatcaacccgaaagtttgtaggtgagatttggtttaaaatcatttctgtagacataggatctcctttcctctatttagcggggaacgggatcaaagcggcctgacggggtaatataaaaatttgaagaaaatgcttgaccttttaaaatctttgatctataataattattaattaaaattttatcaaaaagatctaacaagatcaagtaaagtttaataaataatttatcaaaaatttttagatctgatcttgaattcataaattttatgatctataatatattaatattttattttatcataaatttttatgaagatcaatacttagatctaataaattttatgctttttctgaaaacttttcctttaccccgtcactaaatactggtactatgttcccatattggaaatcaggaaaaacaaaatgactcacttgaaaaaattcaaagaatttctgaccgaaggtaaaaccctcgctcgtaccgtagcacgtggtcaacgcgctaaaacttccgataaacattcaatcggttttcttcacttcaaacatggttctgatttcgaagttttagcaccggattctcacgatctggcatacttcggtaaaaacattgtacgtttgaaaggtatgactactggtaaagttcaagcggcttatgtcgattgggctaaaggtactgtttctttctacagtggcaatccggatgatgatctggatttcgacaaaccagaaaaattcaaagctgctactctgtatgaagaggcggaagaaaatctggatctgtataaccagttagcagaagatttcgaaatcgagatccctatggatgaagctctggtgaaaggtaaagtttacaaactcccaagcaacgatatgcgtcttctgtacactgggcgttctaaaactaaagcaagcggtgaatatgcagtgtttaccgtagttgatgcttccggcaaacctcgcctagtatctggtaaaaaattcacccaggaatataaaggcgatatggtttctaaactagtcctggctgaatccgaagatctgaatgaagcggctaaaggcattcgcgaaaaagttattgctgtgatggtgaaacgcgggtttaacgaaaaagatgcagaaaagatggttgacaaaaacctgaaagatgctatgaaagttagacctggtgcgacccctggcaaacttgcagaaatagttagcaccctgtaaaaataaagccccttcctttcggttggggctttttgattagtatttgctccagacttttttcgcgccgtaaggtttccctttggacataaattgctgagtcggtagccaaacagctttcgcccaatctttaggggcaatctctgctaatggtgatttgaggtgtgatggtagatatgctttgatcatttctgttgcgcctcgcatacctttcacgttaccccagttaattttaagcactgtcttgttagagaggcgtttagtggatccgtaccctcgcttcaataactcttctaaaaactcctgtcgtgctctgggtggcgcatagtgcaagttcaaaccatagaacactaagttacccgctttcgatcttccggatcctaagaaaatgatcagtggaaatctatcccaatacggcagggtgtctttatattttgcatcatatgcaaacgtgtacaggcgacccgttgctggttttgccacacggtgtgttttgatactggttttgatgaaattaccaaaccattctgttgaatctttctgtcgctttgccgccgatacaccaacagtgatctttttcagactattacggaaatcgttgatgatctcgattccgtgttttttacggtagtcattacgttttttacgggcttctgtctctgcggaacgtcgttcaatctcatcatcaatctgttttttgtaacgatgcattgactttgtgaacgttgcgtagtttaatccctcagaatcggcaaaacgtttagcagaaacacctttcgtttttgccttacggaatttgatccccagttcaacccaatcactcaatttgcgtttgggtggtgctttgggtttatcctcttccgcgatgatctcaaactcaaaaataaaactcatgtttccctccagggattactgacctcgccacccaaaaacttttttgagtgattcttctgttacgattttgaactgccagcctttttgacggcatagctcatttgcggctttccacttatcaatattaactgtataggtgtaaagagcatcaataaatttctttttattgtgtacgttgttgtttactggcttcggtggaggcatggtttctttaaggggcttaacctcccaaagatatgtagtaccattttccatttccacatagaaatccatgtaatagcgtcttctcttaccgtctgcattgcagaaatacgggatcactatacattcagaattccaacgttttacgtgtgggtttttatccagccacttcataacgtagcgctcccacgatgacctatacgtaatctttcgcggatcgcctttatacttctgtatgttttcgggtacaaacgaccctttatacgtctgtcttccagccattgcgtaaatcctaaatagaataatataacgtttagataggggaacttatcgtgctattttcatacttcccgcctgttgattacaaaggcacccagacaactgatattttccgagactatcgattttattttaatcgtgtgattggaaaatataaaacccgtagttaccagataacaggcacactacgacctgaacaacttgcagaatcattatatggaaaccagcaatactactggatcctgttgatgcttaactctgtttatgaccctttctatggttggatctccgatcaggaagccgcgtatcagtgcgctatacagcgttattctgaggttggcggtgaacaggttctgtatcatgtagatgaaaacaacaacaagtattataaccttgtcgaagaccccaataaccctggtcattggtatgacaaaggtgacaaaccaatgctgtatttacagtatcaaggtgtattagctcctgtagatatttatgaagatgcagtgttgcaaaatgaagcaaaacgaacaataaaaatcattagtccgtctgacatccaggcgtttctgaatgattttattaaagaaatggaaaaggctaactcatgaaattaggcggaaatttacactcccctttctttgatggggtggttgaaaacgttgatgatccgcgcgggttgggccgtgttcaagtccgtgtatttggacaacacccagcccaaaaacaaaaatccgatgcaatcggtgttcctgttgaagatttaccctggatgatgcctattcaggatattagaagcgctgcgatctctggtgtgggcttctctccaactggtatcactcgcggatcctttgttgttggttattggcgtgacaaatggcaccaagatggtatgataattggtactgtcgctggtgaatatgtcgaacaaccagacacacagaaaggtttttgcgatcctatgggtgaataccctcgctatgttggtaacgatgttaactcccttgcattaggtggtttgaaaggcaaaggatcatcaagtgtcatcattcgtgattcaaacacaagcatagcagtaaacccagacgatcgcccactggatgagataccagaagataaccgccctgatacgggtggatttacgatcgaaaagatgctcaagcaggatgaggggatccgtacacgatggtatacagacagtgaaggatatccgacaattgggatcgggcatttgcttatccgcgaaaagactcgcgacactgcaaaaattaacgctgcgatcagtaaagcggtaggtcgagaagtaacaaacgggacaatcacggcagaagaggtttcaaccttatttgctcaagatttagccaaagtaagatctgatattcagagaaccgctaacgtccgtgaagtgtatgtgaacctaaaccgtcctcgtcaaatggcgatcgaaaacatgtcgtttcaaatgggcgtcggtggtgttgctaaattcaccaataccctaaaagcgatgaaaaatgaagattggcaagcggcttataatggtcttcgcaattcactgtgggctagtcaaactccaggccgttcttctcgcgtgtctaaaatcgtcctcacgggcaaccttgaatcatatggggtgcaagtaccagatccggaagggcgctctctgagtgctgcttacgctgcgtataacggtgctacattgtcggctactagtccggaagatccgtttactcctggtgatacccgtgtgatgtttgaagaaccagcatcatcttataatgcggaatatccgtataacatggtgtttgaatcgagatccggacacattcaggaattcgatgataccccaggatacgaacgatataaccgtgttcacccagcagggagttacgaagaaattcgcccggatggaacccgcgttgttaaaatcgtaggggatgattatcaaattgtgatgcagggccggaaactcaatgttaaaggcaacttgcaggtagttattgaaggcgacgcattcatttacaacatgggtaacgttcaacaaacggttgatggtaacgtaactgagtttgttcgtggcaacgttcaacaaactgttgaaggtgagtacgttggcctgattaaaggtaacgctgaactaactgtaaacaaagatgcaacagttaacgttgatcagaatcttaccgcaaatgtgaaacagaatgcaaccgtagctgtaacagaagacgcaacgatcactgcaaaaaatgcgaaaatggagattgaagaaacgatggatatcggtgctaaagatatcaatatcaaagcaacgaataacacgtttattgattctggcgcattaacaaaaatcactggcggcaccgtccaagtggggtaattaaatgattatggattatgaatcaataattgatggaattatgcaaaattatcagcatccttgtgatgctgagatccccgctggctattatcggcgggttatctggcaagggcatacagaaaattatccggctgttggggttgagtgggataccgagataatcaaaatcggtactcatctttatactcaagaaccattcggacatagaagcacggatctacctgttgtcaattcaccaggaacagatccaaataccggacaatcaacagggatccttgttccaaagattggctattatttcaacactcaagcagaaattgatgcttacattacatctattggtgcaactaaaatcaatggtggtaatgattggtatggcgcggatctgtcaaaatcaaacctatacaaaaaccctggcgaactggctatgtataaggttgaaaacagtggcgggtatctttccggaacaaaccctgtatgtgatgctcgcatacgtcaggcatataatcaggacactggcgcattcaccaatattgattattattggaatggtaatcgtatagcctatatgaagcatgacgaaacaggggcgcaccagtgcaaatatacgggtatgcaggttaacaccaacgcagatacaagcattcctcctgttcctcctgcaatgccttccacttatggggcattaccgagtgaattaagccgtgctgatatttcgtgcattccggcaactgttggtttcgcatatacaaatatcagtgatgctatgttacaggcatggaacgaaacccgtaatacgttcaagctacagtttaacatgttaacgggtgctgtacagaatggattcgggatcgcgacgatgtttgatggtttatccgtatcgatggaagaagtaatggcgggggcgctcgcattgtcacagcaagcatggcaaactgctatgaaagttttcagacaagtgattagcgctgcatttaacattatcggtggtgcgtggggattgattaatcagttcttgcctcaagtaaccatcttaggtgttgcgatcaacatttacgatctggtgtttggtgataattctgttcagactttgaaagatgcatttaatgcaatcatcaaatccggacaacaaacatatgaaaccgtcataaacgcaatatacggggccataggaagcgcatacaattactctgtggaatatgtcaaagctggcgctcgcgaccttgtggatgcgtgtagcgcgttatttgattggtgtttaacgatgttccaaaacggttgcgttgcattaatcgacttatacggtcggatcatgcaaacatgggctatccctccggaagtcccaaacccgttatggtctgcggtgctggctatccgtaacatcatgatgcaaatcaaaccacttgatataattctgggcggtaacttccctggattcactgcaatggatttgtatcaacaagcacaggaaaaagtcaaggcttttgttgatgagtcatacgaacagatccgagggctttatgaacaagggcaggaactttacaaaacgttaaaaaatcagattttcgaacgtgatgcaattcagagaaaattcaaccagtacttaaactggatgtggggcgctgtaacagacgaagcaacagcggcttatcaatctgcattggatgttgcaaacgctgctgtagctgcaacacaggccgcgtatgacgctatacaggaacagattggatctctacaagatgcaatgaaagatacatacagcatggcgatggaagaattaaagaaattgcctttgatgagtacaataaacgagtttttaggcttctgtggtgtcgcatttgacgatcttctcaagtcatatgaaaatgcgattactggtgctcagtctctgtacaaaaatttcattgatagttctcgctcgtttaaagatcactgcaaagtaatctataaccaaatttgtacgttggcgttgagtaaagtcacacaatatgtgaataaattgctgtctctcataggattagcaatcaactttggttcgattagtgtatgtgttccagtactgaaatactaaatagtcgaatgatcaagaggaatttataataatggctactgctaagactaagactgtcaaaaaacagattaaccaaatccccgatatctttatcgggggtactttcgaagaaattaaaacagatctgattgattggctgggtggacaagaagagtttaaggattacgatttttccggctcgcgaatgaacgtactgatcgaccttctgtcgtatgctactctttatattcagcagatgggtaacacggctctatttgaatcgtttattcgcacggctgcgttgcgtagttctgttgtacagtctgctcaagaactgggatatatgccagattcgcgcacggctgcaagcacagcagtaatgattacggctgctaacccactgaccccaacatcgatccgtatcccgcgcggtacaaaattcatcggtactgtaaagaatacagacagttattcttttgttgtatcggatgacgttgttatcgttcgtgatagtaataacaactatacatcaatgctgaacctggtgcaaggccgtttagttcgtactgaactaatttatgacggttcaagtatcctgatccgagatccaaacattgaccgtagtcaggtacgtttaactgtaaacggcgcacaatgggaagactggacaaacgaaagcattgtaaacgcaacaggcgcaagcacgatttactacatgcgtgaaactgttgatggacataccgaagtttatttcggtgaaggtgaagcaagtcaacaagtggcgggtggtgcattaaccgctgaatatatcgggggcttgaaacctgctaatggatcgactatcgttattgaatacctgtcaaccgatggggaagcggctaacggtgcaaaagattttatctatgtcgatacattaaccaatattagcatcactaacatcgaagaaaacccgactaaatcccctgattatgtcggtgctgatggtggtggtgatccagaagatatcgagcgtattcgcgaacttgcccctgttatgcgtgaaacacaacggcgttgtgtaactgcatcggattatgaatctttcctgtctcacagatttggttctatcatccaggcggtacagtgctttactgataacgaaaaacctggttatgctttcatttctgttaaaccaaagtcaggtttgcgcctaacatcggtacagaaagaagatatgcaaacgtatctttcgaaatataacctcgcgacgatcaccccgtcgattatggatcctaactatctgtatattgtgcaatctgtcaaagtaacgtatgatatcagtaagttgacggaatcagaggaatggttacgcggtcaggttatttcgtcgatcgactcttactatactgacaacgttgaaattttcaacaaatctttcagtgtatctaagatgttgacttatgtcgatcagtctgatacttctattatcggttcggaagcagatattaaattgctccgtgaaattgacaactattacagcgcccctatgtctgggatccatttcttgaaccaggtggaatctaaatcaatcatttccagtacgttcaagttcaccaacgaagaagacgaaagttatgatgttcgttatgcttctacggaaatggatcaggatggtaacgcaaaaattgtaataggcccgttcaaggatggggatatttcgatcgctgcttatacaggtgatgactttgaaaaattaacagatgcaggaacccgtaataaatattacgaagttggatcggtttctcattacaccgatttcattagctttgacctgggcgttctgaacgtatccgccgatagtttcagcgctgcttatatcgagctaactgcaaaacctctcgaagaaaccatttttactcgcgatggttcgttgatcgtgtttgaaaatgacctgcgtcctcaatataccacattgactatgaatcctatcagtcaataatctttaacccctgtcttcggataggggtttttctttttataaatacgtgatatacataaccgcaaatttggagaaatataatgattaaagcgccttcgattacgagtttgcgcgttgataaactggctgctaacttcgtttaccttaaatgggatgatgttggcatggatttctattatgtggttgaattggcccgtagccgtgatatggacggaactattattccagacgaagagttaatctggacgcagttgggttatagctacgaaaacgaatggtttagcgatcaggttgccccaaatacacgttataaattccgtattcaaacaactcatgaagggtttgaaccttctgattgggtgatcagcgatgaattatggacgtttgatgagaacgcctacgcatatacaaccatgcgtgaattcacccctgctgattcgtttatcaatgaaaaattcgccaaaaacaatcgtgattacgtcgattttaacgatgatgttattatggcttctctgatggttgaggattttgtatactctcccctgtattctgatgtaagccagatcagcgataagatcctgaaacaagaaagctaccatgaaattcaagatcacatcgaacacgtttgtaatgatatagatcgcacgttcctggtatactcaaacggattgctttacctgtttgaacgttttcagaatatggctaaagtgtcaaatgacaaaggccaaacgtggtattactacaaagcattaaacgatcgtgtaggcaatccggtttcccgtaccattgcttatcagagcactaacactacgtatgtgttaggatacgatcgcatattttacgggcgcacgtcaacagatattcgttggtcttctgatgaagttcgtttttcttctgatgatgtaacttttgcgaagctggggaaccagtcagggttagattttgatgttgactcatacaacacgtatgcgcgtctaccgggcggagtgtcgaagtatgccgaagctatggcttgttctagtgattggctctatgtggctgctaagaacgttatgcgccgtattgcgttacgtaacacaccaattgatactgatcctggttcgccgacctttggtgaacgtatttttgatgaagtttcatatactatcgtaccaggaaatgataaaattgttgttaaaaaaatggatgtgctgaatgatcgtctgtacgttctggtaactggtgaagttaaaacggcgatgatggatccaactgtcaaagctaacgtgatcccatcaaacgatgctggcgtttatctgtgggatgagaatgcaaagacgtttacccgtgtttatggtaaaaccgaagatgaacgtttttatatcactcatgaatataccaatatgtcaaccaatggcgatgaagtttacatttctgttggtaactacaaatatccaggcactttgccagatccagatctggttgaaaagtatccggaagatgtgcattcagcggtgaaatacgatcttgttcctggttatactgcgagcatttcgattaactttgctacagttcgagcaaatcagaacgatcctactgtttggaactttgggccgcaagagtactacaatgaagcaaactttagctggcatttccgcgataaggttagcacatggatcaccaatgataaccgtcctctggtggtttatccggaaaccctgtatactctggttactgatagcgcgtctcctgcgtcaacgattcgtgtaaaccatgaagtttgggacaaaggaacagttactatctacttgaataatatcaaatttactggttttacgaagtacacaaacggtgttctgttgtatcgctcaggtggtaggataattggattctatgaactgtcataccgcgcaagggatgaacttactattttctggaaacctgataacactttaatggtggcaagtctggttaatcaggaacgtgaaaacccatacacgccggatattgaacctggactaatagatcctgatctgagtcacatgattactcgttttgctccgcaaagctatctggacaaccaacagttcgaaaaatttggtgaatactatctgcaatatatttcgttgggtagcaacagttactataacaaattgctgaacctcatccggaacaaatatccgagagagaaaaacaacgttgaatatttgtggtctgaaattaaccgccgtaacatttacctggataaaaccaaacgtgaggcagtggttagattttttgaatcacgtgcaagcgatttctattcaacaaaagggattgaggcaagttatacgttcctgtttaaattactgtataacgaagatgtttccgttgagatcgaaagctccaacagtctcgaatatgatattttggttagttcaacaaatatcagtcaggatatcgtaggccggacgatctatacaccaactggacgcgctaacgttacatacatcgaacgtgaatatgaaaatggtcaattgcgttggtcaatgactctgcataatgctcaaggtaactttatcgaagggcaggttgtcaagtcagaaaaaaccaatttcaccggaatggtaattcgtggtgttcgtggtaaacaaatggctaacaactcgatcgactatataaaccgtggacgttcttactacgtgatgaaaattcgttcaaatctaccgacttcccgttataaggatgacgtattgaggtttgttcatccggtaggattcggctttatgggtatcacgatgttaacagtattcatcaactctggtttgtcaatgactcataacgagacaatcattgatattctgagaaactaccgtttcgatagtggttatcctaagttctggcctgatcgcattgcgagcatggacggtaacggaaaccaacaattcgacctggttactggtgaacctctgtacaccgcacacccgcgagcgggggaaccttttgatgtacctccggaatatgacgttgaagaaaaaccgcttaacggtgttcttccttctgcgcgacggttcgatcaaagtccgttgttcgattgctcaggcgttaaatattcacagttccgtaatttggtggatagacgactgaaagatgatgcaggaaacccacgtgatccaaatcctccatcacagattaaggtaggaaattaaatggcacaacaaaacttgtatcggtcggtaattactgcaaaattccgaaccgaaaacttgatgaacttcaaagatatgatcggcgatgccgccgatctaaacacgatttatatgtctattgggcgaactgaatcatgggcggataacgaatccgaccctaactttgccccgccatatccaaatgatagcaccgatggtgttagtgatatgtggacgcatatgatcggggctactaaagttcctggtgatatgatagatgcaattttaccacgtaaagactggggtgatactcgctatccaaacccgaaaatcttttactttaacgatattgttgttgtaaacaccgcgccttataaccgtactgatccgggtaaaggttggatggtttatcgtgtagttgatgttcctgatatcggttcttgctccatttcgagcattaccggaaaacttgaatgtatcaggatcggcggtatctggagtccgtctcatgaatcgagtgaacctccacgcggagaagctaacgggatcgacatgggcgacggctataaatgggaatacctctacacaatcccgccagatgtcgtgatcaaccgctgtacgaacgaacatatcgtagttcctttccctggcgaactggaagaggatccggtacgttggggttatgataacgtgattcaatggtatccaggacaatacgatctagtgtatcggttaaaggtgaattcaatgcgttttcgtgcgtacatggattctcttttcttcccgcaatctacgctccctggtaacaaagggttccgtcagataagtattattgtaaacccgttgattaaaaaggcaagcccgaccgaacctgaaaagaaagcaactggtgattactataatgctaacgcgcttgaacctgattccggacgtatgatttacatggaaaacagacaacctattattcgctcccttgatcagactgaggaagtgagtattgtattcgaattctaaggaaaaacaatggcttaccaaacagcaaaaaaactaattgatgtcggtgaaatcggcaacccatcaacaggcgatccgctttatgatggtggtgttaaactgaacgaaatgatcaccaacgtttataatgcgtttggtgatgtgcgtatgctgtctgcaaacgaaggtgtcggtaacatggtgatccatgctaccggatactatcagaaattaccacgcacttactattcaagtacaccgatcgaactgggttccctgcatgacatggatacttcaacaggttcgattaccgttgttcttccttctggtaaggttggtgaaggttgctacttcataaatagtacgggtagtgtctctgttgatcgtcctatcgcgtttcgtcctcaagttggcgatacaatcgcgggggttgcagaccagttgtacatcacgtcaccttacacctttgtaaaaatctggtgtaccaaaaaagaaggtgcgatcacaacatgggattattctgtagaatctatgttcggttctaaaacgatgcctgttgacactacggcgcttgtactgaaagcaaacccgactgctattcctatgttcggatatatagaatttagcggggctaaggtgctcgtatacgcagaaaacgtagctggtacagttaccaaaatggcagaagttttaatgaccgtggatcgtgtaaacaaaacgatttattcaacggaatacgctattttgaaaaacagtgaagatgaaatgtttacattaaactttactgtcggtgctggtgatgtcgtatacgctaacgtgcaagcgatcaaagaagatcgaattaaattcacgattaaagcaatcgatacgattaaatcagggatcgcgtcatgaaacaagaaattttaataggtcaggttgtagacgatggtacaggcgattacctgcgtcgaggtggtcaaaagactaacaacaactttacagaattgtataacatgctgggggatggtgagatcccccatccagcaggtgcctggaaaacctttgcgggtacgacgctatcaccaaaatttggtgaatcatgggcgttgaataccagtgcaaacaaaatcaccgtaaacctcccgaaaggtggcgtaggcgactataacaaagttattcgtctgcgtgatgtgtggtcgcgttgggctaccaacaacgttagactgatccccgcaactggtgatactatcaaaggttccccaactcctaaagatctgtttaaagattttatggatgtggaactggtgtattgttctccgggccgttgggaatacgtcgaaaacaaacagattgacaaaatcacaacttcggatctggcaacagtagcaaaagaaacgtatattgctactcagggacaaactgacttccctaacgtattcggtgttggtaatgaatacaacctgcaatcgttcgaagtttactatcgcggtaacttgcttttcatcgatgagaaagacggattcaatgctgataactcagactatggatcgattggttctgctcctggtgaactggttgcacttgatggtaattcagtacgtcttaaaaacccgtgtaacgctggtgacacgcttcaatttgttacctatctagatgggttagcaacatggcgttcgagctatgaagcgtatgtgatgcgcatgtatcagactggtgatacttctctggaaaccgttcctggtgaacagtgggtaggtgatctggcaaccaaaaaagagtttacacctgctgaatttggtgttaaccctcgcgtgttgattaaccctaactcgtttgaactgcttctcaacggtaaacaactggttaaaggcggtgacgctgactatccggcgttttcctgtgaaggtgcggaaggtgttgatgaaagtacgtgtgttggtaactctggtgtatgggttccgtcaggacaggattatagtttagtattcactgattctgtagtgacttcaatcaagtttgctcagaaactggaatccggcgacgttgtaacgatccgttggtttaacaatgatattggtactctgatggattgggaaggaactggcggtattaaagaaaaagctgataaggtttatctcaataacgaagaagaagttatattgacgaaccgtatcgaatataccgattataataacccttctcagaaaacaatgcgtaatacaggggaaacctatcagggacgtattctggatattcaggctatgtttgatattatccacccgatcggaaccatctatgaaaacgcgcacaacccggcaaaccctgctgattatatgggatttggtggttggaaacgttacgcagaaggttatttcctggctggctggacatcaaatgcagcggatcctgatttcgcattaaacaataatgatttagatagtggtggtcaaccgagtcatacggcaggtggtacaggcggtgatcgtggtacagaaatcaaaatcatcaacgttcctgaacttgtatcaaaagataaagttctgattgctgatgaaaatggtgctgtgatcattggtggttgtcagttagatcctgatgcttctggccctggatacactaaataccgtgaggatacattgaaagtgaatcatggtaacacattacctgataaaatcaaaactattccaccgtatatgactgcacatcgctggataagggttgcataatggcttacaacaatatttcaaaaacaagggagggcgctcgcgtcctctctaaagaagcagattacttacagtatgatacttatggtaagttgcctctgatcggcggtaaacgttcgatcggcgaaccaaacattgaccaaacaaaacgcggtgttctgtatggaaacgtacaatccgcaattgatgacctgtatacgcttatcgagcaaatcccgattaacggcgttgttaccatgactgaggatgcccctccaatcgctgtacagcaggttgagagcgtttcttttgatggtattgtacagaacatcgattcagaccaagaacaggctgtagttcacgtgtacggctttcctttcatctttgataatgggactaacgccgcaactgtttgtgaaacggcatacaacaaatttactgaattcgttgcagcggaaaaatatttcgcagaagttaaccgtaaaggtgttgatggtacgatcctagaatgtcgatttattgatagtgttccgcacccggcaacaaatatctcagaaaacggtattcgtcaaatcggaactatcgacgtagccgcaaaaaatggctatggttcatgggttaagttgggttctggtttcttacctgatgttactccgcaagtaaccgtgtattacttcaaacgaattgcataaggataacacatgagtaacaatacaatcaaccacgtaagtgataaatccatttacgtgacatttgacccaacaggtactgattggcctgataccataaccaacgtacaagatgcgttggaaaaaataggtagttgggcgcgtactgatactgggcttcctatcgcaacaacttctgttcgtggtattgctcagatcgcaaccgaagctgatattaacgctggcacggataacactaagattgttactccgaaactgttagcatatcgtatgcagaaccctaaagcatcacaaaccgtatggggttatacgaagtattcgactgatgcggaatctacaaccgtaactaacgatgcatcgtctattactccgcgatcgctgaactatgtgttcaataaccgcaaaggtacagaatcggtttggggttcttctaaaatcgctaccactgcacaggcggttgctggtacagataacactgtaactatgactccgcttaaagtcaagcaagcgatcgcgtctctggttccggttcagtcaagtgcgaccgaaagctcgcaaggtctggtacaactggcaacagttgcacaggttcaggctggtacgatccgtgaagggtatgcaatttcaccttatacgtttattcgtttaactgcaactgaaagcaacctgggcgttattcgcatcgcatcacaggcagaagcaaacgcaggtactgatgacaccaaagcgattactgcgaaaaaattaatcaatacccgtgcaactggttcccagttcggtgttgtcaaattagcaacaactgttggttatgtggcaaacaccgcactttcttctaatgcttatgtattgcctagcgatcgtagtgcggtaattaatggttctctttatgagaatagcgcaatacataacaacaaatatcagacgtggacagatcttgattggcatttcccagtaggtgctattgtcatgactggtttccagactgaccacggtagtttgtatatttgtgatggacgttcactgaataaaaataattacccgttactgtttgagcgtataggttatacatttggtggtggcggtgattggtttaacattccagactgtcgaggcgttgcagtacgtggtcatgaccgtgggcgtggactaaaccctaatcgtgggtatggtacatatgaaggagatatgttgggatggcacgaacacccattacaacttatctaccagaacggcggcaacattccgaaatggcaagcagtttacgaactggaaagcgccgagaagaatgaccaaagcgctcgcgtatttgatgcttctataactaaagctactggtgtgggcggtgaagaaacccgcatgaaaaacatcgcattaaactacgtaattcgtactcaatagaggttattaaatgatcatcgacaaattaaatccgttgccgaagatcccgtttgttgatggcgtcccagatgacgccacgactcaaacgaagattctttggatcaaaaacggtgaaactctggacggttcgccagataaagtgtcaaacactggtagtcttaaccgaactggtgtaaacatccagcagaacgcggttcagttagaacaaaataccatcacccataatgataaaatcaacgaagtaatcgatcaggttaacttgattactgaaaacattgatgctattggtgatgaaagcgtaatcaaaaaagttaaccaattggatcaggatgttcaggcattaactttatcgaacacccaaacacagaacaaggtagcacagttaaccctttctgtaaatgctcagaacgatgaaattggtgaatacgatccagaaaaggatcctaaacaccgcacaattcgtaatgatatcatttacattaagaaagaagttggttcatatcctggatttaacgttgatggtgatgttgacccctcttctactggtactggccttaaataccgcgtactgagtaaccaacgtgccatttctatgcaggaaacccgcataaccaaactggaagatgactgggcgctttccgaagtaggacaactgacagaagaggtaaaagaacttcgtgctgaaatgggtgattctggtcttgccacaacccgttcaatctatgcgcgaattaagatccttgaggatggttctgttgtaatgcaaaatgaacttgatgcgattaatagttatatcggtcgcacgtcaggttcaaccagttccattaacgatcgtgtgaacagtatggaaaactccgttagttctctggctacacaaatcaacgatccggtaactggtatcactgcacaaattacaaccatcaatggtcaaattggtacggtttctgttcagggtagtatccgttatgatattgcggaaaacaaacgcagattgatggatatggaaatgattctgggtgaatccggtgatgaaggattgcaggggcaagttgcgatcttaactggtgacattggcgaagattcagatcctaccagtatcaaaggccgtttgagtgttgttgaaggtgaattacgcaccaacactagcgcactctgggaactgcaaggcgttgtaggtaactcttctagtggcctcgttgcaactagccagcaggttaacaaagaaatctatggcgatggtgttagttccgatcctgttactcgcgctggtttgaaaacgacgacccgcaacctgttcactcaggtaggcgataacgcagaaggtaacgaaacaggcatttatgcactgattgccgaccttaataaacgtgttgaggatttagaagcgttgaacattgcacaggcacttgcagatcgcgtaactatcgaagatctgaatgctaaactggctctgtacatcaaagaagctgacgcagatctccgttatgagagcaaaaacccgcctctgtcattcggtactaacctaactggtgatactgaatacactactggcgatccattgtctctaagcgtaactatgaatggtggtgtttctccgctgtcttaccagtggacgaaaaacggtgtaaatgttggtactgatgctaacacatttaccatcgattcgctacagccttctgattccggaacttacaaagtaacggtaactgatgcaagccataaagtcatcgtttctgatgaactggcgatcactgtcgcttaacgattaacaaggggcttcggccccttttgaggatctttatgattacgaacaacccagcacaattaaaagatgaaattctgcgccgtttaggtgctccgatcgtcaaaatcgaagtgacaaccgatcaggtttatgactgcattcaacgagcattagacctatatgcagaatatcattacaatggatctaacaaagggtatatcattcttaccctggggccggacaacccgaaaaatattttcgatctgagtaaagaacacattttcgcaattactaaagtgttgcgtactaacatgggttcccttgtatcgatggatggtactgcggtttatccgtggtttactgatttcctgatgggccttactggtggttctctgggcgggggtggttgtgcatcacgtacctacggaatgaacgcatacggcgcggatatgggctattttacccagatgatgagctatcagcggtcaatgcaagatctcctgtctccgcttccggattactggtataacgacgacacaggacagtttgcagtatacggaaccgttaaagatggtgatattgttgttatcgaagcaatgatcagatcctttgttgatgtacccagtatggtcggtaacgtcgctggatacgctacagcgggttctgatggtgaagataagccaactatagcagatatatacaataacccctacaaagccgtctcaggcggcgtgaaggctggtcaaggtacaggcgttcagagttcatcctctgcgtataacaaccgttgggtgaaagattacgcaactgctcttgttaaagaggtaaacggtcaggtgctggctaagtttcagggtatgcaattgcctggtggtgttgctccggatggaaccagactgattcaggaagctatgcaagaaaaagaaaacctccgtcaagaacttctgttactgtctgatgcacttccagtgttgatgatgtaagggggaaaaatgcaaaattgggatgaaagtctgtttgcacagttagaagatggttccggcgtcgatcggaacctaagacaagaagtaacaaacccgtatgttaactggtacaagtataaccctactcaacagttacatgattcactaacagccgaagcaattcaaatgaaatctccggatatgtattacgtccgtcgagaatttgttaatattgataaaattttgggtgaagaccgtgaatcgaagtttacaaaatcgtggaaaattgcagcatacatcgattcgtatgcaaactacgaaggacagagagacttttacagcaaattcggtatgatgtcaaacgatgaaatgacacttgtgatcaatcctcgtttatttgcacatcaaactgatggagggatccctgttctgggggatttgatttatttccctatggataatagcctgtttgaaattacatggattgagtttgatccgttcttccagttcggtgatcgtcctcaacgtaaaatcaacctcgttaaatttatctatactggtgaagaattggatcctaaactgcaacgaaatgaagggattaaccttgctcccgatgctgatctggatctcgaacctattcgaaatcttgatggattagcggataccaatattgaacagtacgaagaagatcaagcctttgaagatgaaggcgatgaattcattgaatcgtttgatgttgttaacgggcgcggatcaccgttcgcacagttcccataaatataaccaggggaaaccctatacatgtaagggtataggagaaatcttatacccgctttaacccatacaggaaaaataaaatgtttggattttggtataatagttcgttgcgaaattatattgtcttgatgggttgtcttttcaatcacgtgcaagttaaacgcattcgcggcgaacaagaaaaatttatcaaggttccgattacctacgcatcaaaagaaaaattcctggcatccatgaacaagctgaactatgcatacagtcaggaaaatgttgctaaaacggaaacaattttaccacgtatgaatctatccctcgttgatttgcagtataacgcaattcgtaaaactgggatcgcggtaaaccaaaaaatgacgcagttacgcgcacctggaaaaacagtaacgcagtttaaccctgctccgtatcgtctcatgttcgaactgggagtgtatacccgttacgaagatgatgtgtttcagatcatagaacagatactgccatacttccagccgcatttcaactgtcgtattacagaattacataaaaacgacattaaaatagaccgagatattaaaatatctctgcaatctgtttcccctgataccacgtttgaaggtgatacaacgacacggcgacacattgaatggtctttaatgtttgaattacagggctacctatatccgcctgttaacgagattaaaggcgagatcagaacagtatacacggatttcttttccaatatgaacccgttggacaaagataattttgaatccgttgatgctcaggtggatccggttgatatgcctatacaggattacacgggagaagaatacattcaaacgtatgctaatgatatcccaattcctagcggtgatcaacctcctaaaccgaggggccaataatggaagaatttagcgtaaaacaactacttgatcttgaaaatctccctggtgctgaaactggggaagaaatggttgtgtatgaaaaacttgaactcgttgatgtcgagtcacacccagcagatcgaaaacctgatttagaggaagactatgcacttgcgcgtaaaaccgcgcattacatgaatcagatgatcatggatatggcacaaattgccttgcataacgctaaaaactctgaatctccgagacacgttgaagtttttacaaccctgatgaatcagttaaacaattctaaccagggattgatgaaaattcataaagaaatgcgagaaattaccgaagaaaaaaccacaactaccccgcttcctgaacaaaaggataaaggggttaatatcgaaaacgcaactgtttttgttggttctcctacagagttgatggctatgaaaggtagttcttacgacgcaaaagatgcgattgccggggaatgtgaggaagtatgaccgaaccagtaatgaatccagaaaaagaatcagatcatcctttgaatatgatgcaccctaaatacctgaaacgaaaaatcgaagacgggatggaatgggtacaaagtaaccatgatgggaaatggtatccaaagacgtttaaagattaccttaaaattaacggtatcgaaaaagtaacgttacaggcaaaggataagaaaaatttcgccacctttaaagacaaagggaataagcgaagccgttacatggggatcccaaaccttaaacgtgcgtatgtccaaactcaatggacaaatgaaatggttacagagtgggttaaatgtcgtgacgatattatctactttgcggaaacatattgcgcaatcacccacattgactatggtactataaaggttaaactgcgtgattaccagcgagatatgctaaaagaaatggtatcaaaccgtttctttattgcaaaacttagccgtcagttaggtaaatctacttgtacggcgatcttctttgcacatttcgtttgctttaacaacgataaagacgttggtattttggcgcataaattgtcgatggctagtgaagttttggatcgtgtgaaacaggctattgaactgctccccgatttcttacaacctggtatcgtagaatggaacaaaggttctatcgaacttgataacggctgctccattggggcatttgcaagttctccagactccgttcgtggtaactcctttgcattggtttatcttgatgaagccgcgtttattcaacagtgggaagatgtctggttagcgttaaaaccaattatttcttctggtaggaaatcaaaaatatttttgacaactactcctaacggaatgaactatttctacgatctgtggaacgcttctctggaaggaaaatccggtttcactacatacgaatccaattggacttcggtcaaagaacgtttatataacgataaaaccgatgaattcgatgatggttattcgtggtctgctaatgatattggggcaggtagtcgagaggcatttgcacaggaacacgaaggcgcatttaacggaagtaacggaactcttatttccggctggaaactttctaaaatgtcatggattgatattgaagaaaccgaaagtaatttttatcagtataaagcaccagaagaggggcataaatatattgcggtacttgatccagccgaagggcgtggtcaggactatcacgcgatgcatattatagatattacatctatgccgtttgaacaggttgctgtataccattcaaacaaaacatcgcaccttattttgcctgatgtcctgttacgttatcttatgatgtacaacgaagcatgggtttatatcgagctaaatagcacaggtcactcagtggctaaatctttgttttctgagttggattacgataacgttatttgtgatagctatagcgatttggggatgaaacagagtaaacgatcgaaagcgattggctgctcaaccctaaaagacttgatagagaaagataaactcatcataaataacaaaaagacaatacttgaatttcgtactttctcagaaaaaggtgtttcgtgggctgcggaagaaggtttccatgacgatctcgttatggcgctggtttgctttgcatggctaacaacacaaatgaaattcgcagaattttgcgagaaagacgatttgcggttggcaaatgaggtattcgcacgtgagcgcgaactgctttatgaagatatgttatgtcctgttatcgtaacgagtggcgacgaaacaatatctgtcggccaacacggtatttcgtttatataaatttagaggaaacttaataatggctttaatctctccaggcattgaaactaaagaaacatcggtacaatctaccgttgttcgaaattcaactggtcgtgctgctattgttggtaaattttcatgggggccagcttaccagatccgtcagatttctaacgaagtcgaactggtaaattattttggctccccagacaatgacaccgctgattatttcatgaacgctgtaaactttttacagttcggtcaggatctgcgtgttgttcgtgtcgtcgataaagaagccgcaaaaaacgcaaccgcgatctataatcagatcaaaaccacgatcaccgctgctggttctagctatgcagtagacgatcaaatcaaagttaaacacaataacgttgttattgaagaagatggcgttgttaccagtgttgatgatcagggtaaaatcctgtctgtgttcattccgagcactaagatcatcgcacacgctaaacaggttggtgtatatccggatctgtctagtggctggactacagaaatcgtttccagttcttctggtgtttctgctacgattacaatcgacggcgtagaagttgatccgggtattactctgctcaaccttgacaccgcaaaagaaactattcaggcaactgctttccaggaactttgcaccaaataccagctaccgtctgttatcgcaatttatcctggcgaaatgggtagcaccgtaacggttgaaattctgtctaaagctgcatacgattcttcggctgtcattaagtcttatccttctggtaagtctggtaaaaacagcggtcgtagttcgatgaactttggccctcagaatgataaccaatacgcgtttattgttcgtcgtggcggtattatccaagaaacgtttatcgtgtcaaccgctaagggtgataaagatatctacggttcaacgatctacatggatgatttctttgcaaacggtggttctcagtatctgtatggtacgtccctaaactggcctgtcggattctccggcgttctggaactgggcggcggtacttctgcaaactccactgtaggcgctgatgaactcatggctggctgggatatgttcgcagatcgtgaatctctgcatgttcctctgctgattgcgggtgcttgtgctggcgaaactgccgaaatttcgtctactgtacagaaacacgctgtgtctatcggtgaaacccgttcagattgcgttgtattcgtttctccgccgcgttctgctctggttaatatcccactggctcaggccgttgataacctcgtagaatggcgtacaggctacaaaatcggtaatactaccccagttgataacaacatgaacgtaagttcaagttatgcgttcatcgacggtaactataagttccagtatgataaatacaacgatgttaaccgttggatcccgctcgcgggtgatatggctggcctctgtgtttataccgatcaggtatcgcaaccgtggatgtctccggctggctacaaccgtggtcaactgcgtaactgcatcaaactggctatcgaaccgactaacgcgcatcgcgattctatgtaccaggtacagattaacgcggttactggtttctctggtggtgctggatacattctgtacggtgataaaaccgcaacgactgttccaagcccgtttgaccgtatcaacgttcgtcgcttgttcaacatgatcaagaaagacattggcgataacgcaaaatataaactgtttgagaataacgatgatttcactcgttcttccttccgtatggatgcaggacagtatatgtctaacgttcgcgctctgggcggtgtatacgattaccgtgtggtttgtgacactacgaacaacacgccggatgttattgatcgcaatgagtttattgcatcaatctacgtcaaaccagcacgttctatcaactacatcacactgaacttcgtagcaacctcaactggtgcggatttcgatgagttgattggatcaacgtcagtataacatgtaaggggctgaaaagcccctataaatacacatagaggttagaaaatgcttactgatattgtacgcgcctttgaatccggtgatttcgcacgtccgaacctgttcgaagtagagatcccgtacctgggcaaaaactttaaattaaaatgtaaagccgctactatgccagcgtctaccgttgaaaaagttccggtaggttacatgaaccgcaaaattaacgttgctggtgaccgtacctatgatgactggacaatcacggtatataacgacgatgcacacacaacccgtgatgcaatcgtagcatggtcaaacatgctgcatggtatgggtgaagacattacaggggatatccctgcaaactacaaaaaaaccgctacggttaaacagaaaaaccgtaacgacgaagtaaccgccgaacataccatttatggcctgttcccgaccaacgttggtgaggttactttagactgggatagcaacaacgaagtgagcacttttgagtgtactttcgcgctagactggtgggtttaaacgctataaatacaggggtagcaataccccttatcattatttttcggagttgtaaatgaacttttttggattagacaatgtgttagggtttttcaaaaatttcgccaaacaggatgaaatggaatttgaagcccaattaaaagatgatacaggttcgattgcgcctccgaaaaataacgatggggcgcacgaaatcgaaacggacttatcaaaccagcgttattcttctgtgtttcaacagttctattccggacaggatccgcgaattcagaacaaaacacagctaataaatacataccgtggcatcatgacatatccggaagtggaaaacgctgtttctgaaatcattaacgaagcgattgttaatgaacaaggaaaagatattgttacgatggatcttactaaaacgaattttagtaaaaacatccaagataagatcatggaagaactcgataccgtaatgaatattcacgatttcgataaccgaggctctcgtttattccgtgattggtatgttgattcgcgtatctatttccataaaatcatgcacaaaaatgaagctgacggcatcaaagaattgcgccagttagatccccgttgcatggaactgatccgagaatcggtcacagaaaccctacccggtggggttaaaattttccgtggctatcgtgaatacttcgtatacaccgcaccgaaaaacggttatagctacaacggacagatttatagtcacaatgacaaggtaaaaattcctcgctctgcgattgtttacgctcatagcggccttgaagattgcgacaacaacattataggctacctgcaccgcgcggtcaagccagctaaccagttgcgtttgctggaagatgctatggtgatttaccgtattacccgtgcgcccgaacgtcgtgtgttctatatcgacgtaggtcagatgggtggccctaaagctacacagtacgtaaataacattgcacagggcttaaaaaaccgtgttgtatatgacgcgagcactggtaaagttaagaatcagcaaaataacctgtcaatgacagaggactattggctgatgcgtcgtgatggtaaagcagttaccgaagtttcaacgcttcctggtggcactgccttctctgatatcgacgatgttaaatggtttaaccgtaagctgtatgaagcgttacgtattccgttaagccgtatgcctcgcgatgatggcggtatccagttgggtaacgatggcggtattacccgcgacgaattgaactttagcaaatttattcgcgaattgcaaattcaattcaaccctgttcttgcggatccgttaaaaactaacttgatcgcgaagaaaatcattacagaagatgaatgggatgaaaacgtaagtaagattgcttttgtatatcagcaagattcttactattccgaaatcaaagatattgaaattttggaacgccgtttaaacctgatgggacaacttgaaggggtggtcggcaaatatatctcccataaatacgtaatgaaagaagttctccggatgtctgatgaggaaattcaaagcgaagccaaacagatagaagaagaatcaaaagaagaacgttttaaaaatccagaagcggaagaggaaaacttttgatgaaagaatttatcgaagcaatcaaaagcggtaatctggtggaagctaaaaaaactttttactccatcatggaagaccgcaaagaagcgcttcgtcacgaattgcgcgttgaacttgccgaagctgtacgcatcgaaggcgaagaagacaaagaaaaagacgacgaaggcgctgataaagatgacgaaaatggcgataaaaagccagccgaggatgataaatccgataaagatgatgagtgaggtgtgtaatgcaacttgacatcgaaatcaccgccgaagatctccaggaacatttagacgaagcgaaagcccgtgtagatattctgggtatcgatgaaggcacggttaaaatcatcgaaaatttggcggtcaccgaaccaaatttagcccttgctatgatggcggttgttgaaggtttaacacttgatgaggtaattgtcaagcatgttgattcccgtggcaacgtagaacgcctcaaagacaggaaaacccgtgagcgtaatgcgtatcagactaccggattaaccaaatcccaacgtcgccagatcgcgcgtcgtgctctcaaaacaaaacgtgctaacccgtcaattgctactcgcgcacaacgtaagcgcaagaaagcattgcgtaaacgtgctgcactggggctataaatatgaatgaatcccaaatcaacgaaaacggcgatatgcttttaatcgaagaatggggtttaccttgcggtgacgtttcagaatctattttagaatctgttggggaatcaaaagacggtaaattgcggatcgaaggtattttccttcaagccgaaaaggttaaccgtaaccgtcgtttgtatcctaaaaacgtacttgaagaagcagttaacgattatattagaactcaagttaacacccgtcaagcattaggtgaaatgaatcaccctccgcgcccgaatgtggatccgcgaaatgcttgcatcctgattgaaaaattgtggtggaagggtaacgatgtttggggccgcgctgttgttgttgaaggcgacggtggtgatggtgacaaactggcggcgttgattcgtgctggttgggttcctggtgtttcttcccgtggattaggtaagctctccgattccggcaaaggctacggcgttgtacaaaagggctttaaattagctgtaggcgttgatgtcgtctgggggccaagcgcacctgatgcatatgttaagcctatagtggaaaatcagcaaagcaaaccgcttgttgagaataatagtgctgatgacgcttttcgggaattgtccgagcgtttgaaaggtctataaatacattaaacaaaacaacaggaaaatcaaaaatgcttaaagaacaactgctggcggaagcccagaacctggatactccggtcgagttagacagcattttcgaatcagttgaactttctgatgacgtgaaagcgacattcaccactgtattcgaacaagctgtaaaagctggcgctgcaaaactcgctgaatcccacattacccagatcgcggaacgttccgacgaactggtcgaagctcaggtaactgaacgtgccgctgaaatcgaaactaagctgtacgaagatgctgataaatattttgcgcacatttccgaagaatggctgaaagaaaacaaagaagccgtttcccgtgacatcaaagccgatctgtttgaatccctgatcatgggcctcaaagaagttctggttgaacataacgttgtcattccggaagaacaggttgatgtagtcgccgaactggaagacgaactgactgagaatcagcaggaagttaaaaccctgtttgaagcgaatcaggaactgaccaaagaaatttcagaaatgaaacgcaatgcagtagtttcagagaaaactaaaggtttgaccgaatctcaggtcgaaaaagtagaatctctgattgaagggctggaatattccacaaccttcgaaaataaactcagcgcaattgttgaaatggtagcaaccaaagctgaaaaacccgttgacgagtctgtaaatactccgcaaacgaaagataactttgttccggtagtagaaagtgttccggcagagaaatccaagatcaataaatatgtacaagcggcaaaagccctttcttaatttcaaaaggtaagaaacaatgtctaagaaaaacgaattgatggaaaaatggaacgatcttctggagtctcaggaaggcttaccggatatcgctaccaaatccaaaaaacaactgattgctgccattatggaagcacaggaaaaagacgcagaagttgatccggtttaccgcgacgagaaaatcgttgaatccttcggtggtttcctggcggaagctgaaattgctggtgaccacggttacgacgcaaccaaaatcgcttctggtaactcaagcggtgctatcaccaacatcggccctgctgtaatcggtatggttcgccgtgcgattcctaacctgatcgcgttcgatatctgcggtgttcagcctatgactggccctactggtcaggtgttcgctctccgcgcagtgtacggcaaagatccgctggcttccggtgctaaagaagcattccatccgatgttctctccggatagcatgtactccggtcagggcgcggctccgagcaacggctttaccgaactggcttccggtactgcgatcgctgacggtgctatcgtgttccacgatttctctgaaactggtcgtgtgttcctccagaacgtttctggctctccggttactgtaactggttctaccgacgatgctctggatgctgctgttatcgccgaacaggaaaaaggtactctggctgaaatttcttacggtatggctaccagtgtagcagaactgcaagaacagttcaacggttctactggcaacccgtggaacgaaatgggcttccgtatcgataagcaggttatcgaagcacgtagccgccaactgaaagcacagtactctgtagaactggctcaggatctccgcgctgttcacggtatggacgctgacgccgaactgtctgctattctggcaaccgaaatcatgctggaaatcaaccgcgaaatcgttgacatgatcaactataccgcacaggttggtaaaactggtttcactcagaccgttggctctaaagctggtgcgtttgacttccaggatccgattgatgttcgtggcgctcgttgggctggtgaaagctacaaagctctgctgattcagatcgacaaagaagcaaacgaaatcgcacgtcaaactggtcgtggtgctggtaacttcatcatcgcttcccgtaacgtggtttccgctctggctcgtatcgatagcggtatcactccggcaggtcaaggtctccagaagactctgaacgttgacaccactaaagcagtattcgctggtgttctgggtggcgtgtacaaagtatacatcgaccagtatgcacgtggtgattacttcaccgtgggttacaaaggcgataatgaaatggatgctggtatctactacgctccgtatgttgcgctgaccccgctgcgtggttctgatccgaagaacttccagccagtaatgggcttcaaaactcgttacggtgtaggtatcaacccgtttgcgaactctcgctctcaggctccgtccgaccgtatcacttctggtatgattaccaaagaaatgttcggtaaaaacgcatacttccgcaaggtttatgtgaagggactttgatcctaattcgttgaaaaataacgatattaaagggaaccttcgggttccctttttgtttatataaatattgaaaacattcgaggctatattatgaaacatatcatttataagataacaaacacaatcaataacaaaatatatgttggtgctcactcaaccgaagatatcaacgattcatacatgggttccggtattgcaatcaaaaaagcgcaaaagaaatacggtatgaaacatttcataaaagaaatacttcatgtatttgatacccgtgaagaaatgtatgagaaggagagggaaatagttgatattgaattcataaatcgaccagatacgtataatgctggtattggcggtaaaggtgctccaatggcgttgattggatggagtgatgaacaacgcaagctgatttctgaaaatacttcgaaagttatgcaatctccagaaatgcgcgaacgtctttcaaaaatcaaaaagggaagaaagcaatcccaagaatccaacaggaagcgctcagagacgttaaaagctaaatatatgaatggacgtatagacagagagtataaacctctcacagaagcgcacaaggcgaaattaggccgttctgtatcgatagatggagttgtatactcatccggatcggaggcggcaaaatcccttagtatgtcccactctggtttaaaatatcggattaatagcgacaaataccctacctggaaatttgttgcataaataccattatacactttacgcaggaacataaaatgagtgaaaaattttacacaattaacaagctggtgcgtcagtcacagctaccgcctggcctgtctaaaaaggttcttgatgaggcaaccggaacagaaacaattaacgtagctaatacccgtccggatctggtatctcttacccgtgcggtaaacaacctgatctacggtgaacttgtagcaattcaggaaactaatttgcctaccgcaaccctgttcggtgtgcgttatcgtaaccctaaaggcgatatgacgttttccagcgctgctacctattccggtaagtatgcaagccgtgataacattccagttggtgcggttggtactgcctataccaaaggccaagtttttaaacatccgacaagcgatgtcgtatacgaagcaactgatagcgtaactctcgcaggtgctgatattgatgaagcaattatggtcgcagtattcagcaataaattacgcctggcaagcgaagccgcgccaacaagtcagtatgaaaccagcgaagatattagcacaacttctttcgaaatggatcgttggaatatcaacgttcgttcccgtaaattcaaaactgaaatgaccgtggaacttatgcaggatctggaagcaaaccaattcaacgcagaaaatgtgattgaagatgttctgggtactgttgccagcgaagaagtaaacaaagatatcatccagactctaatcaacgtatcacatcgttacaacgttgatggtgtggtaacaaatggcattttcgatgctacaaccgcatacactgcaaaggatgctccggctttaggtcgtttcctgtatcaattagtgtgtgaaatggggcaggaaatgaatagaacgacttcatttgaagctacctatgttctggcctcttctcgcgttgtaagcgttctgtctgcgtctggttggatgcatgaaactgatgaaacccacccgttagcaacaggtcgacttaaaaacggttactatgtctatactgacaccaatacaccgtttgattacctgctgactggttgcaagtacgatctgggtgaaatggatcatgttggctctctgttctatacgccatacacagaagctgatcaggcaggttcgatcaagatttctgttgatcctcaatccttacagcctaaagttgctattctgatgcgctacggtttatcggttaacccgtataccactgctgcaaacgaaagacttgtgaaaggtgatgactgggtaaacctctcaggtaaatctaagatgagtcagattgtgggtatcaaacttcctaaactgggttgatagtataacccaacggggataatattcaataggtggagtagggaaacttactccatcttttaataattattataattaatattaaattagatcttgaatttataaatgatttatgataaaatttattaattataattattatagatcaaataatttttgaaatcaagtaaaaataaatttgattttattaattagatcatgtataattattcttttaataatatattatattagatcaaataaaatttgactacaaattaatatagtatattatagatcaactgggtaaattggtgagtatgttatgagtttgaaattagaagatctgcaaaatgaacttgagaaggatatgctgatagatcccctcaagttgcaatcagaatcagcggatatcccgaagatttgggctaaatggcttcgataccattcaaacgctaagaaaaaattgatccaacttcatgcgaaaaaagaagctgatgtgaaggatcgtatgttgtactacaccggaaggcatgacaaagaaatgtgcgaagtggtgtatactgggactactgaaattaaaatcgcgatcgctggggatccgaaaattgtagaaaccaacaagctgatccagtattatgacatggtggtagatttcaccagcaaagcactggatatcgtcaaaaacaaaggatactctatcaaaaacatgttagagatccgtaaattagaaagtggtgcataatgtctactgaaaatgaaaaatgtgtagtgtgcaagtgtccggttccttctactggttttgtgactgaatctgggcgcgtgtgtagtactatctgtgctgactacatcgcagaaaaaacaaaaaacggcgagatcaacgaatccgatgatctgaatgaagttcaaatgttgctgtaggaggatcttatgattggatacggtgaaggaattacagatcgtgatgaacatcctgatttttagtgcataaatactagcgtacccgaaaggggcttgataaaagaatgctggatgataggcgtactcttttgcgccgtccgatggagtttaccttcggcggggtgattgataatataccttcgatcaagggcatgtgaatagaatagccagaatagtacagcactggcgttaagcaaatgtacaaaagccccttcctttcggttggggcttctttttagaacttttcttcttctccgctttcgagttcggcctttaattcttcggctcgacctttcagcgcatcgcgcatagaaatatcgtctgacggcgcaacatcaacttcttttacacgatttttgtaatatttttcaagctctttaaggccgtccatagtacggcaagaggcgaccttgctcatgaaatcatcaatagccgcctcataaagtcgaaaatcgttgaaactcttcattttgacctctaaatttcgatttgtttgatcacgtagtcaaacttttcttcattgtaaatgcgtactcgttcgattgcgtgtttcataccatagtttttgtatgaatatttatttttagcatttttggactttgccagcgttgctaagttatcaaccaaatcccaaacagtagcaagagatttagaatcatgtttacgcagtacgcgcccaattgactgtttgactataacagcagatttgcaaggatgtccgaagatgatgtgatgcaggttcttgacagaaatacctgtactcagtacaccaatagaaccgattacgatcagccccttcgttgattccgcgatccgtttcatttcgtttcgctcatcaatccccgtttccccagaaatgtatacaacgttgtcatatacctttttgagttgctcatacagccatttaccatgtttgatctgattgaacatcacaaacacgttttcatctttttcccttgccagtttcaacgccagcttacagatccatgcgttacgcctggtatgcgatgttatatacttgatttcgctttggtaatcggcccccttcattttcttaatctcatcctctttgtatctcatgaagatggtattaattcgaaggttggtaacttgaccttcctgcatcaatcgatttgtatcaactggcttgaagatttgaccaaaagcgccaatgtattgcatcatgtttgctttgccttctttcagagaaccagaaagaccaaacttgaaaatacactgatccattgtgttgatgatcttctgtatgctttgtcctgttgatttgtggcattcatccaccatcaaacacatgaactgctgaaaccactcaggaggcattttaacagccgattgccacgtagacacgtagatcaatgcattactgtttttagcagttcctgaacgtattccaagcattgcctcgcgaggcaaaaggcgatagtttacaatatcaccgatcatctgatcaacaagggcggttgttgggacaatgattagtactttgcctgtgtaattttccagacaccaacgagatatcaacccctggataagagatttacccgctgacgttgggaggttaagcacagcacggcggtttttaatcgcatggaacaccgattgtttttgataccaatacggatcaatctgcttgtttccgtcgtatactgggtgttcttctaaccacttgtcaaaatctggctgggtaatttcttctgtttcgtggatcttaggatccatccagatagaatacccgcgagactccgcgaattttgttacaagataggctaaaccgtagggcagtttcccgttatagtccatcaagtatatgtagccgttccatccaccatatttgtattttgcctggtactgataacctggcggctggaagctgaaatagtcgcgcaattcatagactatgttagcctctgcctgaatctgcacatgactagtgttaaggaatttgacttcgatatccactatgtgtatcctatatacggtttatatgaatatttataggctaaataatgataaacattggagaactacaatgagtattgattacgaaaaggttgaaggtttcaaagccttagaacaaaaagaagccaaattacagcttgctacctatgcgcaagaaacgtttgatgtcaaactgaaccgccagaagtcattcgaaaatatgcttgctgatctggaagctgccgtaccagcagaaaagccggaactgttgatcgactcccctgatccggaaattgttacatacgaaggtaaacaatccgttcctgatgttgttattgatgtgactaacgattttatggattacgttaaagaggttgctccggaaattgcagaccagattgaaattgttcctgacgctctacaagctactgtaagtgattctgagacggtttctgatgaactggcatggatggaagggtttaccccgtctatcatcatgatgggccgctctgtttcgaatactggcttttatacgtgtccgtattggatctatgattggatgaaacaaaatccggattggtacaagcaccctgatggttgccctcattattcagcgcgtcaaaccctcaagtcgctggcatggtacatgcatcgtgatgggatggttactgtacgggaaaccagaaacagccagttcgacacgttcaaaaaataattttaaaaagtagttgaccttaccctgctattcgagtatatttgtattcgaaggcgggggaatggctctcgcagtgaagaaggaaatacaaaatgaacatgatgaaaaatgcttactacccagttctgtttgtttggactaatggtgaagttaagaaaatcgtcaattctaaagctccttattacactgttggtgaagcacttcgccacgctgcggaagcaaattatcctgctcatgccgaacctggttatgctcgttggaacggttctaaatgggttgctgatacctgggacaactacgaagaagaaagaatggagtgtgatcctgattacgtatctcgtcaaatggaagctcatatgattgcagatcgtagactggataatgaagctcgcggattttattgattaacaaggggctacggccccttttcttttaggtgaaatatgaacttaaatcacgaatgtttaaaagatttgagcgatggtaacgagattggtaacgttatttttcttgatatcgatggcgttctaaataatatgcggtgcatgaaatttggtgaacatatggacatcgaatgcgcacgacacttacgccggatagtgaatcacgctaattgtgatatcgtcatttcctctacgtggagaatcggcaacagtacccataatctacgtgaaatattttatccgtggggattgtatcggatcattggtaaaacttgcactaacttccctcatagcactggaatgcgtggtgatgaaatcaaggcatggatcgatactttcggatgtaaaaactatctcattcttgatgatgacaccgatatgctttcttcacaaaaagatcattttattaacactgatgggtttgttgggttgaccgaagaacaatccacttatgcgatccgtaacattttcggggttactactccgttttgtcctgaatgcaatgggtatggacgtgttaacggctacgacaaatgcggaacgtgtaacggtaaaatactccggctataaataccaataaacataagaggttaaatttatggcaattccttctgtaacaattagcgccaacaaaaacgaacttttgattggcgaaactttgaccttagaggttgaaactactgaactagatccgggtgatgtgtttctggcctatcgttggcaaaaagatggtgtagatattccaggcgcaaccgccgatacttacacaactacggttgacggtacaactgctggtgattataccctgatcttaaaacacggtgctgatgaagaatcagcaacagaaaccacgtcagatacaatcaccgtgacaacttattctgatgatctcgtttctaaatggacggttcacccgattccgtggcgtgataccagctttaccccgatcggttattgggtacttgatgaaattctgtatcagaaagcacagggtaaagattggaaaactgattatgctgattacaagtatagtgaggaagtacaaacgatcctgaaagcgttcatggaaaacggtgaatgtgagatccaggattcacgaaacggctatattcataaaatgagtgaaatctaagaggctttaaatggcaactgaaaaatggactacggttcatcctattccgtggagaaataccagttttacatatcttccatactggctatacgatattatcgttgatgcttttgagaaaggcgacgactggcgcgattatgcggaagaaaaatataaattagagtttgatactctgaaagaggcgtttgaagattatggtgatattcatgtaatcgaatctcgtaatggtaaactggttagtctgttgtcattgactcctgctcctgaaccagatcctgaccaataaaataaggcaaacaatgaatacacttctttttgatttcgacgacactttagcagaattttctcagactttttatgataagttcggtgtacgtccggaaggaacgccaaaagaacgatatgacgaaatggcggcttctttggtgcgtactgatttttataaaaaccttccccgtattcaggctgggattgacctccttcaatggagtttccaacgccgaatcggtgatcctgctactttgctgcttcgcgcggaagcggtcagccctctttgggttatgaaagaaaaactgaactatactgataagatttgcgctgaactggggatctctcgtctcgattttagtcgcattgactatccggaacagttcgcagaacatgcctatcgtggtgttctgatttcccgcaaccagaaacatcttgaaatctggaacaattctcatctagctaataaagttccaggtattttccttgcggaaaccctggaagaaaatattcagctagtcacggaagcgcttgcaaaggctaatcaataacaaaaaagggaaccgcaatggttccctttttttacaatctttttaattcatcaagcgctgttttcttatcaccaacaaagaggattgctttacctcctgcttttctgaaaggcaacaccgcttttgcccgatcgtcaaacagaattcctttaccagcgaatgctgctttttcatggctacttttaacgtagtggaattctggaacgtaacccaatactttttgtaatgctttacgtttttgttcggcaacaccgtcagaattgaatttaccgacactggttagtattgctacatcgccaagtgttcttaaatgatggaataattcaaatccttctttgattggttccagattttcgtagaaatcagttttggcaatttttgctttgcactttttcaactcatcttctgtcatcatcgagggttcgccatacattggcacaaatgaaccttcccagtcgaacaatacaccatccatatcaaagaaaaacttattcatatcaattcctcagtttgtgtatgcatactataatgtttaatcattaatgtcaatcccaagtgtcagttttcggtgcgtatgctgcaactttagccacaatttccttatccagttcagctacagatttctgaggcttaccacgggctttaactttgatgtagtttgacttaacaacaaacatccctttgttacctgatttcttgatctcgctatcaacaccaactttgttaaagctgatccaaatgtcgccgtccatatactgtttaagagaatcacccatgttcaggatcttcgccatagtaagggccgcgccttcgtgggtatccatgagaatttctttaggaactacacgatcgcgtttctggttctgctgcatagcaatatgcacatcgttcataacccatacgatatgtacgttttcttttttgtatcccagcgtttcgacatcacgcgcgatgcttgccagcttgctcatgccttttaacgttacgtcaaagatgaggttaggtttacgatcttctggtgctgccataataccggaataaacacggttttggtttttgttggaaatgttgaaaacgtcggcgatcacatgatggagggtagatacgttttctgggtttttgaggttcattgttttgacatcatgacccgtttgtttcttgatctctgctgcgagtttatcgctacccattacaagttttttcagggcgtcaacgtccagtgtaataccttcgatgcctagcagtttttccagtgtgaatcctttaccggaaccagcaccgccagccagaataacaacctgaccaaacttaggataagcacggcccccgaaggtgatcagcgcttcggttaaggtgctttctgtgaattgtttaaatgacttcatgtaaaattctccagtttattttctattatttattgacatgctttctgacagtggtgtatggttatggtgttcgacggataggccggaagaactttaaaccataaggtatatgatatgaaaattgatttacatcgcttcattgcagaattttcccgcgaccgcgacatggactctttcaactactactcccgtgaaattgaagatcgttttgcggctcatgttgggttccgtcgccaccatactcctaaaatgcgccctgaccacgatccgaagtatagccctatcacatggcaagccccgatcaatggttacgttgaagggatccggatcatgacttttaacgcgatgtatggaaacgctttgatccatattgcacgtgagaaaaaggcagaattccctaacggctggcgtattgatgaagtgattcaaacccttatgcagttacgacgtgaatacaaagctggtatgtgtctgcgtaatgaacagtatccgatgtataaaacgtatgcctatatctctaagcatctaattaattccatgttttacatcgttggtaatcatggttccgctatagatatcggttcttatgaaatcgtggcttatgctcgcgaacaaggaaaggccgctgcactgaaaatcattgaatctggtgctatcattcttaaccatcgcattgatactattgcttactatggcgatcaggttgaggttgaaggcgtacaccatgaacgattcaacaaagccgtatttgctaaaaatggttatgcttatggtaatgacattataacttctgctattcctttcgttcgtctaactgttgaaggatttggagaaaggttgccttataaactgtcagaagctcaaatgtgtgcggctgctgaaagaatcgccaaaaagcggaaaatgtataccgatgaatacctggcgtatgtcaacaagacaaaagaagatgtagatcgagaaatttcttgcatggatttgtgcctttgatataatgtaagcatcttttaaagggaggatgcatgaaaacgatacattgcagaaatgaaaacgttgtttactatcacggttcgtgtactgctgctggtattgaaagcatgttattgcctccctgtgattctgatactctgtctgaaaaaggcaggaagaaaaatttagaccgtgttttctttaccgctgatatcgggttagctcgtatatacgctggaagggccgcgcgttctataggtggggatcctgttctgtacagggttgtgtgtccggttgatgttgtatgcatgaacgaagacaaaggcgcgagcgtttaccatgcagcatgggcgttttgtgaggaattatgaatgataaagtgttggcgtatctcgttttcttgctgggatatcgcttagaagtgatgggcgcgtattcatcaatgtatggtgatttaacggctatctggatggtcgggttaggggttgcttttacattcctttcctttgcaattgttaatgaatcggaaaaggatattgtatgaaactatatcatgtgatctactctggtgttttaggcattgacaaacaaatgttagttgatgtaatgtgtaaaaaactcgatgaacgaattggaactcgatacaaaaatcatgtatcggaaagtattttcatcaacgttgaccatccaaatgacatggaagaaatggttaatactcttgatgatcagcagatcccgtttgttgacaatttcaacatgagcgctggagtgtatacggtagtaacttttgttctaaaaaatgttgacagccgaaacgatagcgtgttgaatgtagttgcaaaaatcgattctaccaaaggaaaataatatgaaaattgtacaccgtagcatttccgaactgtctcaagccgaaaaagtgcaaattcatttcaaattcaatgatttgcgtaaaggttatgccgaaattgcccgtgaacatgggttagataacggcgatatttaccaggtagtacaggaaattgaacgtatccgcgcgttccgttctgcaaatctccctgttaaaaatgcaatgcgccgtgaagcgatcgaaatccatcgtaagcgtgtgtacaatttagaacgtgctaaacgtccgatgaagaaagaaaagaaacctcgtccgtttaaacgtgaacatcttaacacctctatggcgctggcgtttcaagatgcggggattatctaatgcgtaaatctgcgatggatcgttgggctagtattgctacttcaaacgtaaaaccaaatcaagccgcgcctgatgtagaagcggttcgtaaagcaaaagaacctgagatcgtggcccttagccctgaactcatcgagcatcgccgtcgtgcgtctgctattgaactggatctgcgtattgcgcgttcatataatctcaagcatgaacacgccgcaaagaacaaccattcttttgaccttactctggaagattggaaagtgttgatgacaactgaacgttgtcagtattccggcaagatgtttagcaataaaccaggtagcccatatgcccgtacaatggaacgtattaatccacgtctgggatatacacaagaaaatacaatagcggttatcaacgccgctaatgccgaaaaatcacagcttgatgcattcgttaagggtgatgtcattctggatgaagtaaaagtgaagttgctgcgtaaagcactttatcaagtcgaaaaacgtgtgaaaatgaaaggttaaattatgtttaagaaatattcttctctgactaaccattatgaaggtaagttcatcaatggtgtaattatgaacgggcttactggcggtgtgtgggttgcacgtgaaaagatccacggtgctaactttagctttatcaccgatgacggtattaccgttacccccgcaaagcgtactgatgttgttaagccagccgaagatttttatggctgttcagcagtagttgcaaagtattccccagggatccgtaagatgtgggaaaccctcaaaaagaccggaacttatgatgatttggttattcaagtctacggtgaatttgcggggcgtggtgtacagaaagatgttgattacggcgaaaaagatttctacgtattcgatatccgcgtaaatggtgaattccttccggataacctgtgttcgctgatctctcgatctcatggcctgaaaatggccccgctgttgggatacggtacttttgaagagatcaaagaactgccgatcacgtttgaatctgttgtgaacaaagcaaatagcggcattggtagcgataatacagtatatggtgaattcgtatatcctatcatggacgttgaagagggcaacattgcagaaggttttgtaatgaaacctgtttcacctgcttttatgccaaacggtgaacgcgttgcaatcaaatgcaaaacaaccaaattcactgagaagaaagcgaagaaagcaacccgctttaatgctccggtttcactgtcagaaaaagacaaaaaccaactcgatgagtttgtttgttaccttacagagaaccgtgtgaaaaacgttctttcgaaactggatctggcttcgatcactgcgaaagatttcggtcgcattatgggcttaacggttcaggatgctatcgaagaaatcagccgtaatcatgggcctttcctcgaacagttcgaagacccagcaatggctaaaaagttgtttgtaaccgaagcccaaaatatgattcgccctgtatggggcaaaatcctgaaccatgaattttaaactatgaacagtcacggaaactatagaagtatttctgatgaaatagccgcaataagagaactccttcaatacgtttcagttgatattacttctggaaatatcgtatggtcttctccgcgtcaaggtaggagggttggtgattccgctggtactatgaaagatggatattgtgttataaagtttcaaaagaaacaatatcgcagacatcggatcatcttttatgttgctaatgggtatcttcccgctcttgttgaccataagaatggtgttgaatttggtgatggtatagataatttgcaagaggcaacgcaacaagagaacataagaaagcagataaagaaacgaagcaatgcttctggaaaaagaggggttatttttgataaaagaagaaataactatcaagcgcgaatagttgttgatggtaagcagatttttctaggttcatatgataaccctgaaaaggcttatgaagtttacaacgaaaaagcaaaagaattgttcggtaatttttatgtcgaatgattttagtacagtaattaaaactgccaagacagtaacattaattggcagtcgtaaacctcctgaacgtatcgcaaacattgctgttaaaatcggacgtgctttgaacgaaagcgggatcagggcttattctggcggcgctcctggtatggatagtcactttctgtttgactatagtccggataacagatgtataatccttcctgagaacgggtttaacggccttttctcaaacggaaaggatatcatcgactttcgagatttaaacacacagaaagccgctgacgaagccagaaaggtagcaggtaacttcgatacacagaatgaatacgttcaaagaaggtatgcgcgaaacacgattcaagttcttcgtgaaaatcttgacaatccaactgattttgttttattttgggcggaagaacgtgaaggatgtgttaaaggtggaaccgcgatcgctgtaagattggctaggttgtacagggttccatgtttcaatctcttcaaagaaagtgtattgaacgatgtgtgtgatacgttagggatcaatatcaaacccccaacgttggattttttatggtaattgaacatgcgcccttacttcgtgaaacatacgaaagatgggctgttaataacgcaataggtgaaaatatgattcatgtacgtagtatcggtactgacggcgaaactccggtagaaggccgatcccccactctcgcagaacgagcaagagaaattatcaacgatcagaatgctaagatgatcgaacatgcgcgggatacaatcacaaaaggtgttctgaaacacgcgacacaacaaaaccttatctatgatatgaagcacgatatcggctcttgtctgggtattgaatgtactcgctatgcattccaacgagtttctgaatggttggaagaagaagggctaaaattcgatacagaagaaaaacgcaacgccgctaagatcacaaattctctggctagtaagtacaatcaaacgtatagaaaccaggaagaacgtgaagtgttcggtttcaaaattcctgaaaggaaaacagatcgccgtgtaagtgaattcactttttacattagttggtaaaaaggtgttgacgggggttggttatagtagtattctaactcccgtagacaagacactaactcagaaggataaacatcatggaaatcgtaatgaaagcaacttatgctggatactgcctggaagcaaaaggtgttgctaacaatggtaaaggcttacgggccaatgttgaagcaatgctggatgaattacatgcaatgtacgaatatgacaacgtagcgggtagtgttcttatccaagcgttggaagtcgatggtgttgattgtgctggttggtgggatgcttacattgactacaacgataaccgggtttacctgttgagcaacaaagattatttctaaggaaccattatgagcgatgaagctgaggctttagaagattgggctgattttgatgacgaagaagacggtgaatatttctgcgttaatcgtggtgcttataaagaccgtttagaactccgtaaacttttatcgggttcctctcaaatatcaggatccaaacgaaaaagtagtaaacaaaaagttcagtatagtgatggttctgtacgtgatgaaactgttgttgctgaattccgtggtcgggttatcacaaaagaacgacaaattgatgtaaagaacttgtatgaagtggctaaggctgctaaaacaggttctgtgattgtttgccctgtgtgcaaagaaaaacacacaaagacaacgtatcacaaagttttctgttcgaatggcagaaaaaccagtaaggattgtaagtctaaatatcacaatacaatctatcccgaacgactggatcgggtattttaaaataaacttaaaacgtggagtacgtttatgaacaacaaaactttcgaagaactgaacagcatcatcacttccgtagattcctataaggtttctcactggtcgcaatatccaactggctccgaagaggcgctgttttatattgaatctcgtggtggtaaatttgatcaagtagttacggctggctgtaaccgccttgcgcaaatcctatcacgtccggtgactatggaaaacgtagattttgctaatcggttgtacaaaatgcactttgggcgcgaaatcttcaactacaaaggttggaaagaaattgcagaactgggttacatccctcttgaattcagagcgattccggaaggaaccccagtagcggttaaaaatccggttgcaactttccatgctgggaaaaatgcgctgtggttagcaggacacgtagaaaccctggcgatcaggggagtatggtttccttcaaccgtagcaactctatcccgcgaatgtaaaaaagtgttgaagaaatatctcaagaaaacctccgatctcgaaggtgaagcatttgatatggtattacgtacccgtttgcatgacttcggcgcacgtggaacctcttctgctgaatctgctggtattggtggcctcgcgcacctgtataacttcctcggtactgataccgtagaagcgctgattatggctatctctctgtttgaagattgtcagaaagcgtttgatgatggtgaaatggcggctggtatttcaattcctgctcgcgaacattccactaccgtttcttacggcaaagaaaacgaagaccttgcgtacaaaaacagtattgagatcttcggagaagggatgtatgcatgtgtgtatgattcctgggattttaaagcggcggttcgccgtatcgcagaatataaagattctattctttctaagggcggtactctggtagttcgtccggattctggtgatatggtagacaatatcatgtacgctcttgaagaactgggccgtatctttggctatacagtgaactcaaaagggtataaagtactacacccagcagtaaggatcattcaaggtgatgaaattcatggccctgaaacaatcaatcgggtgttgaactggatggagtctaaccgttgggcgtctgaaaacatcgcgtttggtatgggcggcggattgcttcaagaagttacccgcgacactcaaaaatatgcgatgaaaatgtgcgcaatcaaaattaacggtgtgtggactggtgtgtataaatgtccaaaaggcgctgaatggaaaaagagtaaaaaagggttgttgatgactatcactgatggtgttaactttaaaaccattgatactctggaacagaaagtgccggaaggctggaaagatgctatgatcacatactatgtcaacggaaagattacttcccgtgacactttagaggaaattaggaaccgtgccgggatttagtatccgcaaaaacgacaaaggaaccgtgattttctatgacaacatgccccttgtagctcgcaaggggctttttgctaaaatcgctgggtattcctttaaactggaagaagtcaacgacgaaacactaaaagagatcgtaagaattgccttacagttaagaggtaagaaagacgaacaaagagctattgacatgatcaataaattgggcgaaactcaatgcttcatagtgaatcgtggttacaagtacgataccattgcaaaatttgaaaaagggctttgtgaattatgagttattatggtgtgatcccatacacaggaaacaagcaaaagctacttcctgaattgttcaaattatttccggacagaaacagctatatgcgattcattgactgtttttgtggtggtttgagtgtgtccctaaacgtccctaaacgtccctaaacccgttctaagcaacgattacgatcggacgttgattgatatgtataagcgccttcaaatgcttcctgacctctctccggtgcgagaattgattaaacaacatgggctgggtaagaacgagaaagaagcgtatctcgcatttcgtgatgcatataataagaacaaggatccgctatggctctatgttctgatcctgcattcgtttagtaatgttaatcgaaccaacgataaaggcaattttaacgccaattttggttgtagaacgttgaatgattctaccgttaaacggtttgaacacttcaaaaacaatgttcggggaattgaattctctagcgcatcgtttaaggatcttgatatctgtttgaatgattttgtgtactgcgatccgccgtacctgatcactgatgcagtttataacaagttctggaacgaagaacgcgagcatgaattatatgattttctcgataatttaaactctgatggtatcaagtttggtttatcaaacgtgacacatcatgcaggaaagcaaaatgatatcctgatcgagtggatgcaaaaatataatgtgcataacctcgataaaaagtatctgttaggccagcatactgattcttacgaacaaaataaaacgcaagaagtctacgtgtgcaactaccagaaacgcgacgtaaatacataccctgaaacactggatgacttaatgtaaggtaacatatgtttaagatttttggttatatcccttctgtttacaattgcgctccatgcctgaattctaaacgtctcctggacgcaaaacgaaaagaatatgagtttgtttctgtagccgatgaaaaagacgcagacggcaaaccgatcctgaatgaaacggtcatttctgaactcgaaagcctgttaggtactcgtagactgaccatgcctcaaattttccacgatggtaagcacatcggcggctttgaccaactgcgtgagtacgttcgcacgttgggataaatattaacacctttatttgattggtgttattatgctcactaaacgtattactaagaaagattatccatccattaaacaagctctttttgaacagcaaaacggcttgtgcgcgttatgtggtcgccctttagagggtggccttgaaaaacatcaccttgaccatgatcatgctctatctggctctaatgccggacgtgtgcgcggcctcctatgtaacctatgcaacggtacagaaggtattgtaaagcacaaatttaatcgttctggtctggtttcccgtgatgttgattacatcgaatggctagaaagcctggtagcatacctcaaacgcgattattcacaaaaccgtatgcacgacaaatttatacccgataaggttaaatggtttacacgcctgactaaatcggatatgatagccgaaatgatttctatgggctttgagtactcagaaactgaggatcgcaaggctttagcaaagagctatagaagacaattaatgaaggcaaccaaatgaaatatctaaacgctcgattatcaacgaaacagaagaaaaagctgatgatgttgatatccgccactgacaaaaataccatatctctgcatgattggatgcttggaatgggtgaatctgatttgtgttatgtcaaaccaaaagacagaccgatgtttgatgatcgcggttgcacattgactgctttttcttctatccccgttattgatatttggaaactccttgagattgtaggacgggatatacccgttgatggagttgaactaatcaaatatcttaacgaaatcggacataatttagatattatccataaggcaacgaaatgaatgtagaaaaacgagacggaacaatcgtcgaattcgataaagaaaaaattcgtaacgcagtttataaagctggcggtacaatgacggatgaagacagcgcaattatgcttgtattgcatagtcagatccgcaatggtaaaccaatgaagatttcacaaattcaagaacttgttgaagaatctttgatgaagacaaatccgactgttgcccgtgcatatatcgaatatcgtcatgatcgtgatatcgcccgtgaacaaaacggaaaattattccgtgatatcaagggtttgatgactcttagtaacaaagaattaaccaacgaaaacgcaaacaaagattctcgcgtattcccgactaaacgcgatcttctggcgggtatcgtttctaaacatatggcgcgtaaccatattctaccgaaacatattgtagaggcgcatgattccggtgatattcattatcacgatctggattacagcccgttcaccccatacactaactgctgtcttgttgacctgaaaggcatgttagaaaatgggttccggatgggtaacgctgatatcgaaccgcctaaatcaatcggtgttgctactgctcttatggctcagatcaccgcacagattgcttctcaccagtacggcgggacaacctttgcaaatgtcgatcaggtgctggccccttacgttgaaatgacgtacaacaaacactttaaagatgctgtttggtacggggttcctaaatcaaaacagtatgcgatggaaaaaacagaaaaggatgtattcgatgcgttccagtcatacgaatatgaagtaaacaccttacatactgcaaatggacagacgccttttgtcacaatcactttcggtatgggtactggttggcgcgaacgcatgatccagaaagcgattctgaaaaaccgtattcgtggactgggtaaaaaaggcattacccctgtattcccaaaactggttatgtttatggaaaaagggattaaccttaatccggaagacagaaactatgatattaagaaattggccctggaatgtgcttcaaagcgtatgtatccggatattattagcgcggctaataaccgtcgtattactggctctagcattcctgtatctcctatgggttgtcgtagtttccttagcgtgtggaatgatgagcacggtaatgaaattcttgatggacgtaataacctgggcgttgtgacaatcaaccttcctcgtattgcgattgaagccgaagcacaggaagatgaagacgcgcatgatgcattttggcgtatccttgatgaacgtctggaactgtgctttgaagccctgatgactcgtatcgatagcctacgcggtgttaaagccagtgtagccccgatcctttatacagaaggtgcgtttggtgtaaggttgaaacccgatgatgaaattctggaactgttcaaaaatggacgcagttctatcagtctgggatacatcggattgcatgaaactctgatgcttttcggatctggacaacacccattcgaccggatcggttctcagaacatgggtagactgattctggaatatctacgcgctgcgaccgaagcatggaaaaagaaaaccggatttgggtttagtctgtactcaacccctgctgaatctctatgtcatcgtttctgcaaactggactatgagaaattcggaagtatcaaagggatcacagataaaggctggtacactaacagttttcatctggacgttgaccgcaaggtaacaccgttcgagaaaatcgactatgaagccgattttcattacattgcaactgctggacatatcagctatgtagaattccctgatatgaaaaacaacctagaagcccttgaaaaagtatgggattatgcaatggataaactggactacttcggaactaaccttccggttgataaatgttttgaatgtggctcggatgatgaatttaagccaacagaagacggttttcattgtacccattgtgggaaccatgatccggaaaaaatgagcgtcacgcgccgtacatgcggctatttgggtgctcctgctgtccgtgggttcaacgaaggtaagaacaaagaaatgatgcatcgcactaagcatcaaaattaatcaaaaagcccttgacttcggttgagggcttttgttatattgggcctatcgaaaaggagacatattatgaaactgactaagaaaatgaccgatgtagtggcatgtgcgtttgcattaggctacaaagttgaaaatcatccaactcgcgttgaagtcatcaaccctatcaagggccgtcctggtttggttctgtgtgaagacggcacagcatatcgtaatgatgtctctttagaactggcaactactatccgcaccgcaaaacaaatgaaagatgttctcattagcggcgcaaaattgagggctttatgatgtattggacaaaagataaatttgtttttcgtgatgatacgtgctttgggactgcataccgaaacttggctattcgtggcggttcgttttcggctaatgatttgtctaaggtagtatttcctattaaagttactgagtatgacgtattcggtgttaaaggatttactgattactttggtacaaagtttgaatcagaatcttacatttttactaatagcgatcgtgaattattcaaaaaacacgttgttgttaaagagaaaccgttattaccaaaagaggatgaagcaaaggaaatctatgatctcctgaacatgcttgacaatctcggtacttgtcatctgttcggtaaacgcgcccgtaaagcgaaagatgttctcaacttgttgcgctctcgccggaattacctgatccgggaagctgaacgcaatctgaaaaattcagaaaaacaggctgaaatccataaatccacccttgctaaattaaaggctttgtgatgtttccgttatacgctaaagtgcgtcgaaatgtcgggaattcatatcaggaatggagtgaatggctacgtgaaacaaagtcattctacatttcaaaagcaactgatatgaaaggccgtaacattcgctatcgtaaacccagtggtaaacgagtgaatgggatagattacattgttcttgattcgattcgggatgatatacgataatttaactttgaggcaatattatgattttcaacaaaacaaattcacgtaatttgaactatctacgctgtgaactggaagctaacgaaattgaactgtttttctgtggggctacagatccggaacacaaattgcattgggtatcaggtgagattgtaagcctaaccgaccagattgttgaagaggctacccgtcgcgatgcaatagttaaaattggtgctgttgatgtgaactacgaagggcatccttcatttttcattcaatattatccataaaagtattgacctgtatatctgaatgtagtaacatccttcttgtcaactaaggaggatgttatgaaaatcaaaaacactgctactgaaactctttgcaacgaaattgcagaaatgtactggagtaaaggtcacttagaggctatgaaagagtttcaaaagtggtgtgatacccaaaagttagctaaatgggaatacatcgttattgttgaacggatcaaagaactgatcctcgtgaagaaaggtaacatgaaatgattcaactgaaattagacacaaatgcggtgttaagcctgtttccggaaggttcaaccgcccgcgtagatctccaatctgctatcatcaaaaacgtggtgaataacgtagttggtaagcgtgttagcgaagaaatcaacaaacggatccaggaacagttagctgttctaatgccgaactcatccgaaattacacagatcatcaaatctgaattctcggattacgtcgaaaaacgttatgggtattccaatgtttttgatgtcaactatggcaatgttcgcgaactgtctggtaaaatcaaagaatcggtaaaacagcaatgccaaaccattcttaaagatatcgagaaagaggcgattgctcatgcaacagaaaacattattgcagacgaagccgcgtttatcgctcgcgtctcgaataacctggaagttactgtacgcaaagcagtaatgcaacgggttaacactcagttcccagacattattgacgaagcgatcagagaacgtctgtttggtgaaaaagcatgaattacgaccgcatctataatatggatgtggtcaacggaaaagggatccgtgttgttttgtttgtgactggatgcaatcataaatgcgaaggttgttataacaaatcgacgtggaatccttgcaacggaacaccgtacacggaagagacagaaaaccatctgatttctctgttgagtaatccgcatgttgatggacttacattaactggcggcgatccgctttaccgtgacaactatcctactatcctaaaactgcttgagcgcgtttctaaggaacttccaaagaaaaacgtatggttatggacaggatataccctggaggctttacaggccgacccagaacgttctaagctacttccttacattgatgttctgattgatggtaagtatgaaaaagatttaccaactaaaaagccgtttcgcggttcagataatcaacgtatgatcgaattcgctaaaaaatcgatagaaattaaaaatatttcttgacctaatgtgtaactatggtaatcttaccacatcgtaaatgacgattaactttaattgagagataatatcatgatcctgaatttcaaaacccgtaaagaagcgcgtaactactgctggaagtggaacattcccctgaaaaccatccgtaatacagggcgcggttcttgcccgtggacagttcaagcaaatgaactgaaaacgttcgtagttggtaaaacttacaaactggttgaccgtgaagggtttactaccaattcacacggcggatctaacaccgcaaacactatccaggcgagacagatcgaaaaattcctgaataacgaggtaaaaattatctcgaaaaccaattcagatactttcaaaattgagcatactccggaaatgacttttagctctctgcgttcgtgggaagctcgttatttcgtcgaagttggcgcggctccggttaagaaaacgaaagctaaaccgaaaaaagccaacgttacggctccggttgcgcctgttgcaccagcaaccgcagatcttgatcaaatgcttgatggcggttcggcaatgtcggttgaactggatccgactaaatttgttgaaggccgttcgtatgttctggttaaaccgcagcaatttaaaaatcgttgtggcgctaaccacgggatcaaatcatataccgatgaacacagtaatggtgtatacaccgtttaccatacgacttcgctcggtcatcatcaattgagcaaaacggtagaaaccattgattcccagaccggaaacggaaacgttggttactatctgcttgattctgaacgttcgttcttccgtgaactggcgaccggaactgttgatgaacctgttagcgtttccggtaatagcgctatcgctatcaatgtagacgaagcagctaagaaagaagaaatcgcaaaagcaatgacacagcttgaagaagcggttaaagcccatgatgacgcgcttcaaaatctgcgtactgcttccgacctggttcgcaaagctgctcgaaaagtagcagaagtaagcaagtaaattaaactgggtgctccggcacccttttttatgaggtgacacatggaattattagaaggtaaatcttataccctgaacatcgacgctaaagaatttgcagaaaaaacctggcgaaatgctttagctgaattgatcaaaaacaacggctatattacaatcgatcgtattgcgattggggatactgaggacattgcttatgttctgcaagatgatttcgaatatgagatccctagccatatctggaaatacttcaaaccatatgatttaccggaagaagaaccgaagattgctactaaagaagaaatcgccgcgcctgatttaaatttcgtatcttccgatcctaaaatgtggatgactgtaaaacctgttcaacaagatatcaatgatctgcgatttgattatccttttgtcaagcggatcacttcgatttctgtactaccagcgccgactgattcacaggcacttgaatttgcattacagcatgttttcggtgataataagctgtacgcgattgacaaggaagctgctattgatgaacagaaaaaggaaatcatcaaccttctttctctgcatcaacaacttgaagcggtggaattgattgagcgtatgctttctgatacaaagaaagatatcattagcaaaatcactccggcacgaaggaaagcaattgatgaaaatcgagatttacggtattcccgaatcgcttcataaatgttacggctgtattgaagctcggaaattacttgatgagcatggattagaatacgaattttattctgttctaaagccagcaaataacagtgtggggtttgattacgatcgaccccgcattgaagagttagcgaaacgtgttcgtagtcgaagcatggcatttacttaccctcggatctttgtagatggtaattttattggcggttatatgcaattgaaagagtatttgggtgaagcatgaataaagaatacattcgcaaagtagcaaacgctattcacgcaacaacgattgattttctggaagggtttgatcatattatccaccctgaaacgctggatagttgggaagccaaactgtttaaaagtatcaatgaacagtttccggaaaaggttaagcgctggtttatcagacaggaaatcgtagcaacgatccttaatgaacgtggtgttgaggcgttcggtgtaacccctctatataaacgaaaccagattacagacgaaacaatcaagaaatataaaaagatggttcggaagtaataaataatcagttaaatggccttcgggccattttttgtatataaatattggtattgaatacaatataggaaaaaagataatggtagctaaatcattccgcgcacgaagtggccttgatgctgctggtgaaaaagttatcaacgttgggaaggctgatcgtaatacgctgagtgacggcgttaacgttgactttttcaatgaatttaacggaatccagcagtatgacccgactcgtggttattctcaagacatggcgatcatttatgcgcgtcgtatctggtacgcaaaacagaatattgcttcccctgctggggctttcgacgaatccaaatggatcgcaactcgtaatgacccgaaatgggtttatagtaacgtaaccactccagacggtagcattattgaatctggtagttacattatggctgatggacgctttactgaacttctgtacctgctgccggacaacccgacagagggcgacgtaatcacgtttaaagattgtggtggtttagtaggtgtgaacagtatccttgttaagtctaacacccgtcagatccgtttacgtactgtacaatcggcacagtatcgactgacccacccgtacatgatcgcaacgtttatctataacggtaacgtatggcgtgttgctgaaactctggataaccgcgattctgagatcgtgaacgtaaccggaacaggttcattccagttacaatctggtatgacagttttccgtaacagtgctacgggtaaaatcactctccagttgccgaaatatgcaaatgatggtgatgtgatcacaacctatgacgctgataaaatgaactctatcaacgtagccgttttgcagatttatccaggtagtggacacactatttctgacggtgcaattactggtgttacttcggtaactagccagaaatctggctttggtatgttcatctttgatgcacagaatagccaatggaaagtatatgatgctgataatcgtgttcgtctgcgtcgtatctatagtgatttaaacacagttcctaacgattacgtttttgttactgcaaacccttctgggactataccaaacgttacagttacccttccaactgatgttgctgatggtgatcgcgtttacgtatccctttatatgatgggtaaaaaccagaactgtacaatcaaagttaaagatggtacaacggacaagatccgcaccaacaaaaatatgatgcagttcccgcagcgcaaagactatccgcctgatgattggtttagtgtaacttcattagcatttaatgctgctagtgattacctcccgtatatcgagttttcttacatgaaagctacgaaagaatgggttgttgctaattatcgtccgatcgttgaacgtgttgacgcaactaacagatcgcgtactggtgttattgctctggctgcacaggcagaagtaaacaaaaacttggaagacaacccgaacgacgaaactgctattactccgatgacgttagcaaataaaactgctacagaaacccgtcgtggtattgcacggttagcaacaactgctgaggttaacaaactttcaaccgatacctatctggatgatgtgattgttacccctaagaagctgaacgaaagaacagcaactgaaacccgtcgtggactggcagaaatcgcaactcaggcagaaaccaacggaagcaccgatgatattactattgtaaccccgaaaaagttgcataaccgtattgcatcgccgaccttgactggtatccttgcccttgttgctactggtggtgctcctaacaccaacacggatcgttctcaggctggtactggggtttatgaccattcagattatcagaaagcggtaacgcctaaaactcttcgtgagtataaagcgactcagttacaatctggtgttgtatggctggcttctgaaaccgaagttattaacggtactgttgcaagttcaaacgttccgaccgttgttactccggaaatgctgcacaagaaaacctctactgatggtcgtattggtttgatcgagattgctacccagacagaaaccaacgcagggactgattacacgcgagcggtaacgcctaaaacgcttaatgatcgtgctgcaacggaaacgctgacaggtatcattgcaattgcaaccactgccgaagtatcagcaggtactgtaacgaataaagcgatcgtaccgtctaaactgaaaggttatctggacgatacaagccatattactgttgctactgctgatgggttaactcaatctggtactatttggactacggttaacatcggtattcaatcagcaactgaaactcaacgtggtactttacgcgttgctacgcagtctgagacgaacgcagggacattagatacagtatttgtcacccctaagaagttacacgctaagaaagcgactgagagcgcagaaggtatcattcaggtggctacggctgctgaaactaccgctggcaccgttgcaaacaaggctgtttctcctaataacttgaaaaatacaattcaggttgatacttcatggcaagctaccgatctggtacgtggtactgtgaagctgtctaaggggcttggtacttggtctggtaatgatgtggctggttctactcttccggatgatggttatgccgctgtaggtgttgctgtttctccgtatgaactgaacttaacactgaaacactatctaccgatcggtgctaaagcggttgatgctgataagctggataatctggattcttcccagttcattcgtcgtgatattgatcagacggttaacggggcattgactctaacgaaagaaaccactgtacaggctaacattaactcaaccgccgacgcgagtttccgggtaatgaatgttagtggagatctgaacgttggtgatggctcatcgatgggtaaacttcgtttgaatggcggttcatctaacgactggtcaattcaagcaagttcatcctctgggcgtattgcaatgatctcaacgggtaacactggcacagttcatctttctgtgtataatgatactcgcggcgttgtagctaacgttaaattccaggctcctgaaattcaggcgattggcaaagtgactctgggtaatgatacagtgatcacggctgctggttctgttctctctatgggtacgaacaacaagacaactaagatcctaacttcggacgctggtaacattttggcagaagaatcagggaactcttataaagtctttactgagaagaacgcgcaaaccttgctgaatcctacgtatgtacgtaaagcaggtgatacgatgtctgggcgcttgacggtaagcaacagttcaattatcattgcaggtcaagaggcttggtcaacgctggatgcagtaacagaagcatccaggggcaactggacggctgagatcacagcatcggcacaatacaacttgcttcctggttatgcggttccggttcttgaaccagatccgattaatccagaaatcatgattgtgacccgttatacctatgttaaagcaccgggtactttaacgcagtttggtaacggaactgcattcacttatcagatttgggcacctcgtccgacctctggtactggtgttaatgcgctggcgcaatccttctggatccgtcaaatgaacccaattacgggtaaatttgatggttggggccgcatgtatactagcaacaacccgcctactgctggtgagattggtgcaacgtctgctgttggtactacggttaaaaacatgactgttaccgattggatcaaagttggtaatgttaagatttacccagatccggttactcagacagttaaatttgagtgggtggcataatgtcaaacttaatggcggggttcggccccgattttgtagaaacgcaaattctatcggaaacaaacagcgtaacttacagaataaccgcaaaggcaacacatcccaatgcggttcctaatcagtatgagtttacactaaatcaaaaggcggtagggacaccgcctagtgttgggatcaacgtatggagaattaacaatgctgtagttgatccaattaaaaccttcacattatcgaatgataattcagcaactgcaaacaaagcgtttgttgaatatatggatgctcaaccttctgggctgtatttgataatgactaacggtgaatacaaaacaagccaaatcgttgatgattggtttgctaaaaacagatccgttatgtggcaaggcgctgatttcgctcagagattcccaaattctgcatatgttgcattgtatggggcttcaaaatctcgtatactgattgaatcgttttacgcgaacgatggagttttaaaagaagattcacgcgcatcaatcgatcttgtctatgataacgttggtgatgttgggcgaactggtgtacctttccgatctgttgaagatacggaagaatacaattcaaccaatgggtctgaatataaagtatatcctgttgcaaacccagtgatctctaaactggctgattatggtatggctcctggattagctatgatgattgctggtgatttttacgccagcaaagcattattggatgctggatcaacaacaagggttactgttcgatggtttacgggtactgctcaaacttcatcatcggtgattgaagttcctgcaaataaacctgatgagtggttacgatttgaacagttctatacgatccctagtggttgtgatggatttaacgttgctgtatctcgttatcctaaacccgctacggatagtttatctgcgatccgtaactttgtgatggttcaggtatctgctgccgaagctgatcaaaactttgctgcacagtttggggttaacggtatcagaatgaacaacatgatcgatggcggaacaccgtatatatttgaattgcctaatactaaggtttatccaggtggtgattattctgcttccgaattccgtgaagttgatgcataaacaaaggcccggaacatcgggccttataaatatgtaaaaaggggttattatggcagatttaaaagctggttctacagtcgggggtttacctatttggcactccggcacatttccgctggttccggttggtaatactctaacctatcgcggatataaggtttatactgaaaacgataaaccgcaagcatcaaataacgacttcgtttctaaagcaagcggtggtcaatatttgggtgtagttgcctttaaacaggggctaaaaattaacgctactttcacaggcggaagtgaccagaacggtttatattctggtgatggtgatggcgcgacattatcaaaagccaacattgatcttgtatcatggtatggtattggtattcgttcatcttccggtactaatggtcgcgtattagtcatcaacgctcgaaatggtgatttaaacactcagggtaatattacggttgaaaagcaaatcagtattacaaccgctaaccctactgacgcaagtcatgcaacacgaaaaagttatgttgatggacagataaataatgtcacaacaaatgctaatagcagggtattacgcgctggcgatacaatgacagggctattaactgccccgcaattcgcgagcacaggcgcggcttcccgtcccgaacacgtaccacggctcgaccaggtaattactaaagggactatcatagattttggatcttattaaggtgaaacatggctgatttagaaaaaattcaattcctacgtagcacagttgcggggaaaacacctactacaagtcagcttgcagatggtgaactggcgatcaacatggctgattatgccatttacacgaaaaatggttcttcgatcgttcagttagcgggtaaaggtatcccagaaacaaataccaaaaaattaacagttgatgggcctagtgctcttaatgataccgttaccgtagcggaaggtaaaactattactttcaccaacgagaatttaagtggtgaaataactcgtcatatcgtcggtaaatgtgccagcaatgatggatggtacatcggttccggtggtacaagcaataacggcattcttgaaatcggtactattgacgatggtactgaaacaatccagtttgtacaacgcggtgctggtaacgtagaagccagaaaattagtcttacttgatagctctggtaatactactcttcctggggatttaagattatccactaataaaaccgttaaaattaacaacggaagctctcttgtccttgaaatgggtgtaggctctaacgatgcctatattaaaaaccaaagaggcgtaggtgttcttcaattaactaatgatagtaacctgacgttcagaaattcccaggtttattatgctatgagtggaagaggccctggtaaagatggtactcttctgactaatgtagaaaacgagcgccaacttaagcaagataatttccctatatctacaggcaccgaagctcggtggactaaagttgctcttttaaaagatcgtggatcaagccagagtcgcctgcaactgatggtgactaacggcggtaactatggttctacgcgtggatctatcgactttatcgattgtagcgctagaaactttccatccactttaacaagcgctaatattcgtaatcatctacaggttcgtcgaatcggtgatcctggaattgataacactaaccaaatgcgttatagtctggttcgtacctctgagggtttagaactgtggtttactcaacgcgcattcattagtagtgttaaagttgctctgctgtctattgctggtgatactgagtattatctgcctactggttacacaacttctgcaactgctccggaaggtttagttgagagtgtggctattcgtatctatgacgaaattaataaacctaaccttgacaatggtactgatggtattctgtctattgctaaaggtggtacaggcgcaagtacagcggatgctgctcgtacaaacttagggttgggtactgctgcaacccgcgatgtcggcgaaggtgctggtaatgttttagaaaatggcgcttatggcttaggcggtaatggtggtaaatccatcaacgacattatctctaatgcggatatgttgacccgcttaaaatcatacggcggtactttctggcgtggtgttgctaaatctggtgttagcgttcaaaatggtctttatagtcatggctctggtatttttatgaatgctggtgataccatgtcagccattaatatcgactatggtagtgctaaagttcgtgtatacgcggctaacaacgcggctcttgccgcaggagatgtcaaatacaacgaactttacggtacagcaaataaaccgtctaaggccgacgtagggcttggtaatctgacaaacgacattcaggttaaaaaagctggcgacaccatgactggtgatttagctgcacctaacctccatgcttctgggccgggaaccgcatcggtgtatgttaatgcaggaagcggaaatgctcatgtatggtttagaacaaacgccaatgaacgcggtgtaatttgggcaaatccaaatactacgaacttaggacaaattaacattcgtgcaaaaactactgaaggtgtttctgctggtgattttagcttccgttctgatggctgccttgatgttcctgtagcagttaaagttggtggagcagcaatactaaccaaagacgggaatattacctctggctcgatgtttggtggcaaccttaataactatctgaacaccattaaaaatgatatcactgctggcgataataagcaagtaagtaagactggtgacaccatgaccggtaacttaactattaacgctaacttaaaagtcgaaaaccctaatggatcaatggttgatttaggttcagagaactcagataagtacagcagattaacccttgctcgtaaagttggcgatggcgctgccgtagcaatgcttaaaattactcctgaaggatacgtgcaatttggttatcaaactgcggtttctaatccagctcctagtaaatatattctagttaaatctagcggccttgaggtagaaggggacttggtttttaaccagacatatcgtggtgctgaagacgcagttgatattactgataagactaatgaccttaacaacatggttattaaaggcagtgatttaggtactcgtctattatacaagtgtacttctactggtggtggttctaatatatcgaacaaacctacctctgacggcaactttgttcttgaagttctatctttgcgtaaaatttctgataccgattggacatgtaagcagacctttactacaaagaacggtgatgttgaaggcacatatgttcgatactgccaaaacggtacatggtctgcatggaaagaggttgttgctggtgttcaaccaattaatttaggtggtactggagcaacttctgtagctgctgctcgtaataacctcggtgttggtgaaggacagagcgttaagttcggcggattagttgttgatggaaacatcaacgttgcttctggtaattttgttattgcaggccaagctcctactgataactcgcatctgaccaacaagaaatatgttgatgataaggttgcttctgctattagtaatgctggcgacacgtatcttccgttagcaggtggtactgtaactgggcggttaacaattacaggcgatcagttaaagactacatcgctctgggttactggagatgctgctgttaacggtgttttaactgttgatggaagggctagatttaatcaagagttcattgtatcaacttcggttaacgtccagaacactggtaacagtcatttggtcttccgtaaagctgatggtacagaaaaaggacttatttgggctaatgaccctggtaacgttagtataagagcaggtggtggaagtggccctacttggaacttttgggaatcaggatcttgtcaattcccaggtgctattagtaactttaatggtgttaatagtattactaattaccctggcggcggtattggcgcgtatttaaatacagcgggcctaacaagtagatttagtaatggtgcttatgtttccttatacttccaagaatatgtaggaagctatcaccaagctattcttaatgttaacggctatgggcaagataacagcttttatttccgggctggtggtgatttcatatgtacccgtaatggttcattcgataacgtcgagattcgttctgaccgtagagccaaatcggatatcaaagttattgaaaatgctttggaaaaagtagaaaaactaaccggtaatacttatgagcttcacaacacatccggtggtactactcgttctgcgggtttaatcgcgcaggaagttcaagaagttcttccggaagcagttactcaggatattgaagcagacgggggtttattgcgtctgaattacaactcagtaattgcacttctcgttgaatctgttaaagagctttctgctgaggttaaagagcttaaatctcaactgaaataatgtaaggggcttcggccccttttaggagaaataactatggcagtaacagggccgtgggtcggaagttcggcaaaggctgaaactggcgaagcatggatggtgcaagctggggccaaattaagaatagggacaccgttttggatgtctaatatgattggacaaagcgtattccatttaattttcagaattaactatgcacaaggttcttctggcgatccatctagatatagaggattctttaaaagagggttatcagtaaatataggagactcagcaaaccagccaacattaaatgcatttcctggtggtgaagtagggtctttagtagccattacaaatattaaaggggatccttattgtttgtctattttaaatggggctgatcgacgagttaaagtgtctatatttaatgcatctggcggagaccagtatgatgtttatttcagtggaactactatgagtgacggttggagaagatatagatgcgaaaacgctggtggcctcaatgggtattttgaagctagaatgtataatcagttcggtgctttattagaatatgtttgatagataaaccaacaaactcacctcatactattaaatatattaaaaggctacctatatggtagcctttttgttgcatcctaaatatacctatagtaacctaagaagagtcttataaaatggctgagagaaatcccgtagataaactagccttatttgatctggtaatatcgtttgtgatgggtgtgaaaacatggaaacaattgctgataaaaataattctaataatggttatgtttcttatggtagtaacttggtacaaatggactgatatattcccgatgataaaaggtgccattgtagtcgatacaagggctatcgaaatggaaagaacagaaaagtttaatcaatccgcgttggaacagttgagcatagttcatcttacttccaacgcggatttttcggcggtactggcattcagaccaaagaacataaactattttgttgacattgtagaatatcagggaaaattaccatcccaaatcgatcctaaaaacctcggtggttatccgatcgataaaacatccgaagaatacacgaatcatataaatggcttgtactattcatcaactacagcaagttcctacctaccgacacgtgattttgtgccagtagcttatacttttagttgcccttatttcaatcttgataactactattctggatcggttttgatggaatggtatgcaaagcggcctgatataccagatatgaagataaacatcatatgtggacaggccgcgcgcattttaggtcgagcgaggtgattaacgtaatgctggtgttaaattgtgtgatcttccaatagcccgtttgattgctttaaagaagttcatcaccgggctatttttctcgtaaatatcccaaactttcaatttgtcccacggatccggaacataatcttcattccttgccgaaacccccaacgtaaccctcctgtatccagcgctgtcgtgataatacacgaagaatggcctacctattggcgcaaccttacaacctctcttagcggctctcatagcctcatcgaacgtcatggattcccccaaaaatttctatgcatgaatggtcgaattccgatagtttcactcaaaatgaatatcggatgatctagctcatcgtggttttcttcgtcaatgacgatatcccaatcagtagccttttgttcttctaccgtggcaatgaatacctggtttacttcacacttgcggtgtgtacgtctgatgattgtatccccctcacgaaacacaatcatatcaggattggtagtgcggtacgcggttttacccgcgcacacttcattaagcatatcttcgtatgtcattataaaacctttacacgttgaacgatggtttgtttaacgtctttgtattctccgtgctctttaacggttgctttgaaagtgatttcatcaccttcgtttgcaatgttattaccgaagtaaacaacaacattaccatcaacattaattttggtcatgaatctttctacagaagtgtagtaagaaacttgagtatatcccagtgaaatcactttctcaacggttccggtcatttccagacgttgtttgatttcaccgatgtggttagctttagaaatgcgttcctggcgctcttgttcccactgttcgcggatttcttcgcgtttggcgatataatccttttccagtgcaacacccatgcagtaagcgcacacagcatcgaatacagggctgtttttgttgtcttctttagactggtcagcccaccaaagaacagtaaacattggcatttctgcaattacttcgcctttacgcttgccaatcggcatgatccctttttccagcagttccagtttttcagtatcgaacactgacagtttaccgcgacgttcgaacagatcgaaatctgcaaagccctggaatatcattttgaaagtatcagtttcagttaaacgggctgaaacacggtcgaaatactcacgcgctttcgcttccgctttctccggatcggtagataagttgcagatatagttatcagaagtataaccgccgcctctacgctcaacacgcaaggtatacattgcatttttacgaccagaagaaatgaagtaagttgtagtaactacggttgcgttagtcatggtatttctccttaaaaggtatctcgtttcgatatggctaatatagcaaaagcccccgaccgaagtcaagggctttttaatcattcattcgaatctttcattgctttatgaagatgaatatcaaaaattttccagtacgcctttccgcgaggataaatttttgctttgtcaatatcgttgttgcttccccatgtattgtttgggccacgacagcgattttttatataatccgtatgccagaataagcgttgaaccgatgattccgtacctaatggatcttctttactgaacagaatttgtatactcataagaagaacccagtgcgaacaatcagatcgattttcttttctggttcaaacggtgatttgctatcgatgtcacactgatagaacataccaacatacttttcaggaatgttggattcacgcgcccatttcaggttatcatcggtattcggccccagcatgaggttaacaacatcaacagcataatcctgttctttggtgttgccggaaccgtttacataatgcccgtgggcggttttgaggatctcaattacttcgctatcgtcagtttcgactttgtaaagcgttgtattttcaggaatttcttcaagaatgatcaaagcggttttcatcacacttacctttgtgtttctgtttacgttttgcttctttaaatgctcgcttgcgatcgcggtgagtagaagcgcggttaatccatgcatgtttcgctaccaaattattcatataagccccttaaagaaaaatatttaggggctttcgcccctgtatcaatccagcagtttgcggatcttgtctgcgatacgtccggcacgggttgcgcttgcagtatgatcgctttcttttgaagccagttccgccagcttacgctgatgttcttcttctgctgcttggcgatctgctgcaacctgtgcaacctgctcattatcgtgagcaatacgcgcttccagttcagacagggttttgtcgaaagttgctacgatttcatctacagaacgaattttattaaacagtttcataatttatctcaattggttagttttaatcagtatacatcaatacggctggaattcaaaatcataaatgtcattcagtgcgcggttccactcggtgtagttttcaccagcaccataacgcatttgaatagcactttcgaacgttgatccgttgaggttcgggaaaccgaacaggtttttgattttgtcatgtgctacataatacagagaagcactttccagcatcgcaaccatcgcagacggttcgtgttcgcggcgcttgatacgtaacagagtacgactagcaccagttttacggcgttgatttggtgctacgtagaaacggaatactacgcgccctgttttatcatcaactaccaggtaaaacccgttttctttcagatccacgccttcgaatttcttgaaggttccgcgtttcatgtcaccaattttaattgcatatttgtgaatgtcaagtcttgtcagaattcttttcatattttttagataccagtttgcctaattttgtaatttcgcctgtttttacgttaacaaacaaggcgatgctcagaaatgggatgctaatcactacgctgatcaatgtaaacagaaaacgtatcacaaaaagaacagcacgttcaagatatcgttgcatccacgcgattcctaaacaactataccctactataaaggtggttgcaacataaaatgcaccaaatcctttacgaaatacgtaacctttcccggattctatccggtcgtcggcccacatttcacgggcagttttcagaatagattcaccactagcgcgagtttcgttagccgaaggcatgtttttaaatttcatgatagtctcctatgcgcccagaactctccaggcgcggttgtttag

SEQ ID NO: 62 - DNA, 109411 bp, unidentified
  source 1..109411: mol_type = genomic DNA
ttatgatgcgatggctaacgattgaatgaattgttgcggcttaattccgtagtcgcttctttcttcttcggtcataccttcccagcaatgagctaaacgctcgcaaagatattgataatcattatcatcatccagcgcttcatctatgaatgactcacccgcaaggcgcacaccaatagatagaatatcgttaattgcggtagcgtccatcgtttgaaggccagcagcagcagcagcagccaacacgcctctattatcgtcaatcatagtgatagtagcgttcggatattcagctttaagcatttcgaaataatgcgttttatagataccgtcttttgcatagtacacctctttgtaatcagcatcgccaatatatcggtgcaatacatcgcgggatagtatctggatattaccaccgcgccccgccctgatacgttgtttccgtaggaaatagtaatcgcttttgctcatataacgagcggtaacaacgatgtttaatacagtggaatcattaagggatgcccgcatatactcaaccagcggtaaaagagtgtcggtcataattgcatcatgtacgcaagccgtttcccggtacatgtttaaatctaagttacctttctcatccatacacgggaacacacgggcaaaggaattaataacagtcccgtctaaatcccataacttaattgccttaattgccagtttattaaaagccatttttcatttctccggtttcggggttgttggtaattaatcaagcgagctatattataactcgctttgttaattatcagaagaataaagttaaggcatcggctaattcagccggtttaatccgggtagccattacctggacaattgcgaggggcggggtgtattcgctagaagaataatccattacatcgcctaacagataagtatcatcataatcattttcgcttacgacgataaacataaggccagcggcggcggcgtcaatctctacgatctcgcagatatcagcctcataaagaatagaatcggcggcgactaattgcgacacaatgccggattctttaaattcagcggggcgcgggaggatagcggccacggcttttaataccgtggcgccgtcaacggtaatgattttttgatagctaacatgcgggcgcccttcgctatcgcgggaaataacaaggctattttctacgacgttggacgcggtgaaagatttacgattgttatagatgaaagtaagtttcatttgtttctccagcttatttatttaggggttatttattgccggggtaattgccccggcttttttgttatgcaaagaaagcgccgtctttaaagtcaatcaaggtacgttgaccgttttcataggtgattagatgagtctgtgaccagctagacgcgccaatgttgtagcccatatcaagggaaccagcgacaccagcagtataaacgccgccgtaaatgctaggcgtatgcgtatggccagtgttcatcttaccgagcttgcggaatcccttcgggttgccgcgagcgccgttaatgccgttgtgaccgtgggaaccgcactcgatgcccgcgattttcatcgattcgtcagtggttaaaaagatcgcagcgaaatcgcagccagccacttgacgtaaggcatagtcgagcacgttaaaagtatcgtctttgttttcgattgcctcataaatcgcagcattcaggcgatagtaaagatggccgttcgcgggatcttgctgaatgtttgccttgctatcatccagccagcgagaaagcgctagatcgtgattagactcaacgatgaccgtttgactaaattcacgttccatttgctccagcacgcggcccgtatcgatcaaatcgtcaattaccttgtcacgtccggcggcatattgtttcgcaaggaaaacaccactagcgcggttgtgatggttgcgtgacgtgaaatcatgcacatcatgcacaatctggtaacgagggcgcaggatatcgactagcgcggttccgctagggttatattcccagcttgccgccgcgacagcgtgatccagcttttcggcatgaatgtcaccatattgcagcgcggcaacgtggcccgttacctcctcgccaccgttaatagtaaatttatgattaagatcgtaaaacatcccgctttcatccatcgtttcgatttggcgggcaaagaagttgccgttgtcgtcgatctctaccagtaaagcgccgtaattatgcagcgcttcggccttttggcccgctttttgctgaatataatttttcagcgtcgctgtgccagttgaatacatacggcgcacaatgtcgcccttcattgccgggacactttcagcggtgattttagcgtgaccaatagccagccctttcaggccgtaggcggtcgcagtctcgccaaagccggacagcggaaaatcagcagtcggcagaatgttaatttccgccatgaatgcgaatcctgtttcacggctgcccaaaaacacgttttcattacaaatgaaatctgagaaagcatcatcatatttcagatcatcgttgccctgcccattctggaagccttttttattgtaagcatatttgcttactaacagagtagcgccgaggtatttcgcggcctcctgtaaggttttccagaagttaacatgagggaaggtattattctgaatcgacgttaacagaaaacgacggcccggaattaccttccagctttctacgctagaattaagctgaccagcggcaacggggcgggaatcttccactgcaacacgttgggcgcgtttttcagcagcgggtttaacaggcttgttactatccagccaatcgcaaatttcgctagaatgtttcgccgtcccgtaatgctctttgctcaattcgtcgcagatctccagctttttagcgcgcagacgtttaccccaaaaattgaggttgttagcagcggttaaaatagctttttgtttctcgagtgcaatgatcattatctaaattctccagttatgggatataggcaaaattgccaaatataacgccttgttgctggtggcgttataatttgcgactttaaactattgcgggaataatgctggccgatattccaaaagctacggctagaataataaagattattgaccagcggcggcaagtattcgctttcttgaaccagaaatcacggcggaataaatccatttgttcactgcctatttccatgaaattatagtaaccatagagacaagcggcggcgaaaaagccagcgataagaattaaggattccgtagggaaaaagatcattttacagtctccttttcttcaaaactaaaagcgtagtacatttcccaaatttcgcgggaagataattccagcatttccggcttaaagacttcgcggttaatagccatcccgaaagtatccgcatcagggttaacccacaaaacaatatattcaggtactttgacgctgggaggcgtcataaccttattatcctgataccccgtttggattaattcatccacaacggttcccgttaatttaataacagagcctctaattaaagccattttatttctccagttatgggggacaaaatatttaattatgcgccccgctagggaggcgcattataattattctgctgattcttttacttcatcctgaacgccaaccatacgggcgataacgtccagttgatccagcttcatttgttccaaacttgccagaccgtcggcgtcctcgatcaggccgtcggcgatggcgtgctgagtgagaacgcgcacatagtgagctttacgcagggaggagccgccgccgactttgcgcggcttatcggacttctgatacacctttgcgctaaccagtttagagcgcactttaacatgcgattccgcgccgacagcttttgcaatgtcaatcagaccttgcgagttagccacctccagaccatcggaagcaatgataccttcatacatagaaatggcggtagcggcgtttgtttcgttccatgcaaatttttcggttttagtagcagtcatgatatatctccagttttatttaagggtttaggctagaaagttagccgctatatattctagctagaatatataacgaaaactctttattttagttttcaatttaaagctatttaaagcggcattgtatatatatacgctgcctttaataattacgctattacgtctatttcacgctatagattcgtgttaactcacaattgccgctcaaagcatgatataagatccagcacataagtttaatttgcgcaccataacattgcttgcgctgcatggaatatacatcggaagtctaacataggggaagcatcccattatttaccggggttaaacttattggctattaagcgacagccaaccatttatcatctttgcgaatgactttcaccacgtcgccggaatctacccggacgctgtaaatcttcgcgtcgctgttttttgctttttccgtttcggcgtataccgcattaattttatcaaacgggatcatcgccgcccctttgatatatccgattttttcattttcgcccggcttacttacgtcgccagtaacaaaaggaataaaaacggaatcaccgatcattggggttttaacgttttgcatgtttcttactccagtttagtttattgggttatccggttaacactcttttactgctagagtgttaacagaaaactcaattacccttactgagagaatcgacttttccaaatttttaaagagcggtgttgcttattgagattctataataaagcgttatcggcggattgtcaaacgttattttgtaaagattttaaataagccatcatgttatcccaaatcatcggtaagccttgctgacctccgcgctgataagaccgataacggcgtttcatatcgcgctgcattttgaccagttcggcgcttgccattttgttcaattttgccgccggtttagatgatattacaaagcgtttcatgttgtcaacctttaattagtggagtgtatgatttcgtttagtttgcataatgatttggccgtctttatgaatgaaggctaaatctacgtcgtacacgtttagataagtctctataaaatgttcggcgtctgctactgtaaacgtttttactacgtcactcagcataaatgattcttttaacatgttttcggttcccttattaagtaaagaaagccgataacgctttttatagaatcccaaatttttaaagagcagtgtagggcgggggcagactatacttgtttcggcctttccgttcggggtagtcggggcaatgttaccgcctcctgatacctgactactagtgaaacgctttcgtgtttcccgtttcgccttgccgccctacgagataaataataacacaatggcgtttagccgcaagcggagaattgtaaagaagcgtaaagagaaaacaggcccacgatagataggaagcgcgcgcacgtagcacaaataaaactaaaaagcaagcgatatttaacgatattagaaaatttaatcgcacttttctattgacaaaacctaaaatcctcttggtgaggagatctccccatacccggtatgattcatcggcttttatctaaaaccgcttagaatcgattctagagcgttttagaccctgttaataacttatacaaaaagcaaaaatgaaatttgatgagttatccactagacaaacgattatttttatgaaaacgcaaaataatgcttgcgtttattttatgctgtactcctgttttccgggcaagttatccacagcacaaaataatttgacaagctgagaagcggtataacgagatatccccagacttatccacaggttatcctactgtatatttatacagtatattccggcagcggtaatactctaatatgcctctagaacgctctataacgcattctaagcgctttaaatttagaagccatattaaaggccattgctggaggtgcgcagaaaaaacaaaaagcctgctcattataagcaggcttttaattcgtttgctaactattagcggaataccgtttcaattgtttcgccgctagagcataccgaccctccacgataaaacaggcgttcggttttatatttggttagcagatcatagagatccagatcatcggaaagcgggtaagactcccccagcgcggaaacggaaacaggtttaccctctaccagatcacggcaaatcagaatcagcaaaggccaactaatattaataggatcgccacgcaatccgattttaagtgtagccacttcatcaatatgccttgcattctggcggctaacatattggatcacggtctccatcgttttatagtgggccagaaaatatttgttgacatagatgtaaatcatagatatacgaccccgctaactttccaaccggattttaaaccttcctcaatatgaaggatagtttcagcatccgggatatagataaacgttttcaattcgcgcagattaatgactgcctttccgtcaactatctgtatatagcccaaatagattgcccgctctagaacggaatggaggggcgaaccaccattaacgaggttgcaggaatgaccgggccagtacatataaaacgacccttctaccccagcattacagtatttttcgtcgccgtcctcatcgtcccaatcatcttcgcctaacacactttcagcatgttcgcaagccttttcccaggaaagggaatcgacgtcaattccacggcctaaaaaatgcaggtcagtccaggacgtgccgcaaacgttagtatcacattgcaggacggcggcgacttcctgagactcaattcgcccgccctctaaatataaaccttcatccgcttctaccgtacaattaatgcccggtacgcaagattttacgtgaaacatggttttctccaataatgggggcggctagagattcagccgccgggaaggggattttacagcttatcgcggaaagtatcaagccggttgtttagctctttaatcgcgtcggcatggatttcgtcatacgttgacacgatatccgccagctcatccatagttagcgaactaacaataacggacgttttcacctccagcttttccggttccggttccggttccgctggtgacgtatccaaaaacgtcagtgatcctaaattaattaggaatacttcgatttcggtagcgccggattcgcagtcgatttcaaagctactatcgccaatacagatatcaaagccatagccgtataccccgataatccgcaaggggattcccagcatatcatcggtatccgggtaacaatcccggcggtcaatctggcgagccagattatccaagttttttggctcgatgaaaatagcaaaattgccacgatcgccattctggcgcaggcgctgccatacattagcgatcgtcatcttttcgccttcgaaggtagcggttaaccgttccatttttgtctccagttagttagcagggtaattattatagcgccccactatagaggcgctagatataattattctgctacgtcgctttcaatcaggctagaaagattgacgccttttaatacctcgtcaatcatttcgcctacattgaaactttgtaccagttccaacatggcggcttgcattgcagcatccgccgcaatcaccgctttgcggttgttcggcgcatactggctaaccgcgaaattcagcaggttagcaattaccacacgacctaccgccgtgtcaacataaccgcgaaccataaacggcgctttgctggcggcgatgccggaaacttttttcaggacgatagaaccggcttccagtttagcagcgtttacagcagcgtttttgttagcggcaacgatagcggtagcggtagatttaatagtattcatttgtaatgctccagtctcaaaattattagggttaactacattttcagtaacagccggggcgacttcttctagctcgccatcataacgataatttccagtccttgccccttcttcgatatcaatatcgtaagggtcacatggtaacaggatgctaccgtccttgtcaagcacaaaaatcatcatttcgctagagattcgtgctggtggtagttccagatgatcacaaagatttttaatccatgcgcgggcatcagtgaaagcgagcagttcgctttcatggtagcaaaaacgtctcgacgcttgcttaccttcggacgccttatacaaataggaatccgtagtagtagatactatcagatcaataggctggctgtcaaccaaatattgatcatcgtgataaataacaatcgccgcgccggggttggctagagcgtagtcacggcaatgctcaaaggcatagccggatctactttccatattcgagcggtaaacgcccaaaatatgaccaatagaggcgcacttactgccgtctaacaggttgcgagcgccaccgcgaaccataggcaaattagcaacgggggtaaacttctgtaacattttctgttactcctttgtttggctgagaatctattatagcaagattctccgctttttagcaagcaaaatttttctatgcttgccgggagatcaaactatagggaaatcggatttgcttgtctaccactaaaaatagtggttgcttcccgctagagttatgttattattatgactccaaacaaaggagatcgaaaaatgactttttcaatgttggcgctcggtttagtcgggtctatgatggttttgggttttatcgctttttgcggctatgccctctatgataccttgtttaataaggaggctttttaatgagaagtttgcgcggtggtagtcctaagagccgtagccataacgtttaccaattgaacgttattcgtgatggtcagaaaaagggcggtgacggtggcggcggtgagtggggttttcgtgtcatcatggttattattatgaccctaatctttttgcagagttgccaataatgagcggcctaatgtttttgggcgtgatagttattagcgcaatcattaccctggtaatagtttcagttgtaaaccatttttggcctgagtgtttccacggcgatatgtaggaatgtcgccgccctcctccaccgcgtgaccccttactaaaatatccccacgaaaattaaatcgcttagaacgcttcctagaccccttaaaatcaacattagcagaaagtgttgccgggaactactgtataaataaccagtaggataacctgttaataagtctgtggataactcgctaccgatcgattgaggagtcaagctaatttacaattttgtataactctggggataacttaaatgatagtgtttctcacttccttttcgaaatgcgaatcattctcattcgcattcagcttatcaaacgagaataattatcattcgcattcaacttctcaaatgcgaatcattatcattcgtatttgcatttccgacccccggcccttcctgcgcttatgtgcgaatccgacaatgtgtcaagcaaaatattacgtgaggctgctagggtatgtgcaaatccgatgaaaatttatttttaccgccctgggggcatgtgcaaatccgatactaatatgtgcaaatccgatgataatttttagagggaaggcgcgcagtttgctgcggcgcagcggtgggcgcgagtttgggtgagtatgtgcaaatccgatgggtatttttgggggaggggtaaacggggttaattggggcaattcggggatgatgggggcagggggcagataatggaaaatattatgagttaaatgggggtaaaggggttgacacagaaaaattcctgtggctctaaaaaacaagcgaactcacggtgacacaccgtgtaaaaaggcttgaaatttcaggagatattttatattcgcagaatcgaagattttgatccacagctaccgttcgtcagagataatgtgcatttccgacaaccgtttgagtatgtgcaaatccgaccatgatttttatatgtgcatttccgatagtagtttttatatgtgcaaaaccgatgatattttgtgacgcttagaacttgggcaaatgatgtgagtttgtgtgagaacttcgtggggtagctatagttaggtatgaggtagtgtgatgtgacgcttaggacttgggagatgtgtgaggacttcgtgagatgtgtggaacttcgtggaattgtgtgagtttctaggaattgctttccgaaaaagtgagttggaaaataaccgccctccccttaggtaggtggaaagaaccgccctgtatagaaagatgactagagttcaaccctagagccgcgaaacgatggtgtgtaaggattacctacttttaaacgtgagtaatcgtgagttcattcccatgtttccttattttctccttagtttccagtaattaataattccccttagggttttaacgagctatcgcacaccccggctagcgatactgtgcagattgatcaatttttgtaatttcgcactaagtgtcttgagtcgggacagggccctgacacttacgaaattgaaaaatcaatatctgcacatctctagcggatgtgttaactatctatttaatctaacttttttatcttatagagttattctaacatacatctgaaataatgtcaagaacttttacgagagtgtttgaaaaagtgtcacggggtagatgtttaccccgtgaactcgtagactacagttgagaacgtaggttctctaactcagagaggaaggcaggattcgtttgatcgaaatccttaatgaggaggtgctgatcaaaggagaattcgtagtcttctccgtacagcttaatgaagaggtctggatgttcacgtttcaatacaacatgcgctacgatactcggggtgatctcaccttcttgctggtggtaatcgaataactgtagagtttcatgtctagtttctggtttagctggttcttctttctcgatgccccaaggagtgacaaacttaggatcaccacctgggaagacagatgctctcatcttataggcgtaagagttgagatctttcatcgccttaccgctctgccaaactgcgaagatctcatgtttaccttcagacgctctgaccggtaaataatggtcagggtagctggttagtgcacaacggaaggggtcaccgttatagttaggagcgtgagagccataaagtgtgtcatgttttagtggttcatcttctataatatagagttcaccaatctgcggataagagaaccactgattgagaactttaacagcgaagcggtgtgcgtatggtgtcatcttgagaacgtgatacttcgcccctagatcatcttttgccgatttaccgtcctccgttactgcgtaacgtctacagaacatctctacgagtctacgctcgttagttgtgagagttgagtatttacgttggtgcagctcataaagctcctctagcattccctccagcttagctaccatttcttccgggtacttcgggaatggtttttctactgcgttcagtacagtgttagacgaacttttacgtgatctttgtagtgcatttttaaatctgctcattttcttttctcttatagtccattggactcttttttatagccacgggatcgtggctcttaacttacttcattccacctaggatgtgagaacggctctctacctgtcaagcgatccatcatcctccggtgctcccgctctctgtgttcattaaacacctgaagagcggcgaaactgtccactggcgtgtacggcacgccgttaactttgaggatatcctcgcctctgattttgaatagcgggttgtcctgctgggccttagcgtggcattcgctcaagtactctgcaaaaggtttgccatcttcccgagtacacagggtacgaagaagatagctacagttctccccaaccggagtccatacttcgtatttctcgttcattgtgttatactcttacataaataagtcttcatcggattcagctatttctttataaaagccgtggtatgcggcaactgcctcgttaggtgctgccatgtcgaataagcgtgctctttgttttaattctgctttattttggcactgcctaatcattgcttctacttcatcctgcaaacgttcatccacacgaaccaccagctcaccgtcgtgaatagctccaactttgtacgtcaacatcgtgagatagcctgggtgctgtcgagactttttgagaaccacgttagtatacgctgttaactcatggacgaatactgcacctgggaacacataaggagttagcttcttacgagcttttactgccttaacatcgatcaggtggaagaagtctttcggagtcttggatatgtcgtccggtacttctagttggaactgattccagaggatacgaactttgttttcagacatgccgtagacaatgtacgtttcgttagcttcttcaaaatcaactgtacagaataacataccctagccctcttacttgttgtagaactctgtagcactatcccattttacaagactctcgacatgggcttgatcccagatatttctggagttagtcaatgccgaaacatgcggctgaataagttcgaacttaccaactgtagcaccactggtaagcagtagtgaggataacgcttcgaacttgacagtatcgctaccggacagctcacttactgccttaaccttgtcaattatagagatcatcttagcctcttcacccacgaacgtaaagcgcaggttgcggaagcggaaggagatagctgctacactcggcttgctagagtccggagagtagtttggatggaacttgatctcggagactgattgatcagtaagatagttggtgctcggattattcagggaatcgtatttcatctttaacctccaaaggttttatcaatttactggagttattataccaaataatagagtctccgtcaattgaaaatttgtgataatatgctggcacggtgtaacttccataatccgtaactctagtaaccatgcggtgtctgcatttttggcaaccattgccttctaggtgacttctagcagtttgaataaagtaatcctgatggtctggacaccatatttccaccagctgatttaggctgtggaacactagcttctcatatccgaagaatactccatgagcgtctagagcacggttaataaagatgaggttcttagcatcttgcctaaaatctggcctcaattgctttatcttattatggttgatcgaaccgtcgcgtttaaggaactgattaatggggaaggatttagcttcccatactagttcttgatttatcctctgtcttaattcttccactactcaaattccttttttaacctctcgtacaggtctttggactgaatccaattaagatatactcgattaggttgattgccacctccacgttgagtaagtataaaacactcttttcttactttttcaacagtaactgcagcctggtctacgggattctcccctcgtaggtagttgtctatagacttcattttgcctccaaaccacgaaaggccagagcaattagccctggcctctttgttaggtgaacagatccagaaactcctctggataatcggaaggatctccaaagtcgatgtgatctgcgttgaccgggtagccttctttcgtcttgatgccctgaagaacatgggccaatacgtcaaagtctacgctgctgttgttagtgcagcttgcccaggcttcctgacggtggacgcatttgccatccaccataacctcaacaccgtagccagtattccagcaaccgtattcgcaatccccagaatcttcctctaggaagtttaccacaacgcgtttcttagccatttgtcaccctcttagtgaatagtaccgtcgatgccttccacatggatatcaattgccattttcagcattgactccgatttatcaaactctttcttcgaggctaggagagcttcgccacgagcttttccatactctgcaatagcgttcagggtatgtttcaggatatcgtcggcggataagccctgggtttgccagtgaacttgagctgtggcgatgttcaccataaacttactcagttcaacacgctcttcgtctaacgcctgcattacatgggttttgcagttatagaaggagttcaggcaaatgtcttcttcggtcagaccttcaaccagaagcatcttctcgacttgtgccaggcgatcaagccacggattttggagcatcaaatttttcacttgcatggtataagttcccgtcgttaattggtgcgaatgatttagcgttgcgttcaggacgttgtttagcgatccagcccatcatcatttgtcgaggaaggacaacctcagtgttaaggaatacttcgtaaatccagtgacgtgcgttctgatatttaccgaactcatacgcctttttgaacaagccccaaactacgctaagctctagcgtctctgcatttgcagtctgtcggaacggtatcactttggaaccaatgagttctttcagagcggagttgatatcctgatgactgaacgtggtctcatggaactcgttgaagaaacgatagtccagagcgttattagcgttaacaaacatctggataaacagatcgctgaactcttggtgctcacgattaaaatattgatttaaaacttcagttgatgcggccatcttcccacccgttaattgctacgaggtacatctcgtaaatgaatacagtgactggttgaattgcttccatgtagaacgtcgccgggacgttatggaagactgaaaccaccatggcgagaactacccagcctaggaaacggctgggtagttctcgccatacctggaagttgcaatccaggaagttatagattcgaagctgattaagcattggtcagtctccagtaatagtgacgagtattaaactcgaaaggttcgttggtgatcttggtgtgcatagtgatgatatccggagagtaggactttgccagatctctgcgaaccatcacagtgttaaacggagcgccatcagcacgctgaaccacaattgccaagcctagaggaggaagctcactcaaaggacgccatgagtccttttcagcaagctcaatcttggagattagggcaattgactcaacgatatcttcatcacaaagcaaatcgtggtctactacctgacgcagagcatctactaacacttggcgttctttggagttaagattcatttttcttccttcttaatggtgttttcaatatcatccagcaatgctgtgcagttatcgtagttaactttgccccggccaaagattctcaaaacacaggcatagtacccggttaacagaattgccagaggatacagaggaaccagcattgctgccttgatagtaccttttaaaccgaagccgtggtacttcccggacaggtagccaacaactactaagtaaagtgctgctacaattggtgagatcatttcttaatctccgtgatcaaccgcattttggttgtcttcgacattgtggaatcctgaccgataatctcttcaatcttagccaggcgaactaagagtcgttcagccgcagcagagaattcatcggcgtcttgtacttgactcatcaacttctcgtggagtccgttattggtcaatctcattctacggttattttccagcagtattgatacccaaaccgccagacccgttccagttacgagggctgctattaacagcccggagagaatttctagtaccattactttttcttcgccttttcacgtttcaggtcacgttcaaagctatcagcacgacgctcagcaacctgctggtgttctttggcccaacgcgcttcatttttagcgaggttgtaggccgcagcatttttgttagtaccttcgtacagagcacgaagtgccgggagagacagtttagcaagctgaccttcgaacccatccatatccagcaggattgccagtaccgcaaccatttcgtctttggtcagggtgttagcttgttcgtcagcagttttaccagtggtgtaagagatagtgttcttagccataatgatttccgtccgtttcgttaatttatgcgtatattataccgaaattctaactacttagcaagtgaatttttaaacttttttaccaatcgatccggtaagcgtaaacttcagaatgaatgtgttcttctaccagtttcttaatctcgggccagttcttttgaatctcgtctagaacatagtcgttcgaagcgtcttcccattcgtcaggagtgcgcatgaaagagttcgcatactctagcacactctctagaacgtcagtcaggtaaactatttccccacgattacagtaggcgtgttgataatcccgacgatcttcgttaaacggggagtcgctgagatagtccccgatatgaagaagttcatcggcgaactcctcaaatgccttgacacgagcagacagcggtatgctttcatcacgcatcagcaggttaaaagaagcacgtgcggtgttaactgcgtggcgaagggactccatatttgcattcagttcgatcattgcgtttttcatatttgcttcctcatcaatttataaagctattatacagaaaaattggctcggaagcaactgaatttaaaatacaaatgctacgagcgcccagattcagcctacaattgctgcaccgactgacgcagccaggattaagaggccaataaacattttggccatatcatttcccattccagtatacatagttatttctccagttttctcatgtattcattccagccttcgcagaagggtgaaatcccacaaagctgttcactagaccggtgctgtttatagtgatcttctgcagccttagccccacgtttcttctctgcccttttattaaactcttccagcacaatacgtccttctagagcttctttagcgacaggatactcaggccaatcctcctccaggacaatatagttaggaaatcctactttcccgtccgcctctcgacttttactgatatgagataggatgttgttcagcctctgaatagaggttgaatctagatatttttgggcatctgtatgtttgatgacactataacgagcttcgagtttcatgatgtacctcaggctgtaaataaaaggtcgtccattgggcgatccttatggatctcccagaattctttgggttcccaggtttcagtgtccggggcaatagtaaccgagatattcgcgtcgtctgtaaacacggagtttccgttgtccagcattgcgacacatttctgcaactcgaaaccaccagcaactacgaatacttcaccttcttccagatctttgaaaagtttcatgtttcacctattaaataatgtcagcggaaccacagggatcatcacgatttgtggtaaatgtgtataattgacctaaaaccggcgacgccacggtcatgcgaccgttaaaggtgccacctgtgtccagatagacacggttcttccagcgaatgggaaacgggacaccagtatggccatgaaacgtgtagtctactcccacgatttcaggcacatcgactgcgcactcctcggagaagctggcgtagcgatcgaagtacggatgcttctccccactacgatacagattaaacccaacttcttggattacatcacgatcccacagcagtacacccaaacgacgtaaatctggtgtagattcatgttcgtgcacaatgtcgtcccacaccggtacagttacacccataccttgagcctggtagcgcagagggataccagcatgaactaccccgtaacgcttgccacggtgttcaacggtcatcatgtatggcatcttgctgtccatgtcttccgcgatacctttcagggtatccgtatcgaaaccttccgtgatagtccagctaccgccattatacatccagttagcgtagtcgtcttggatcatgaattcgtcatgattcccgcggacagaacggaatttcgggttgtacaggaacttcgctagaacctgtaagtttttcgggccacggtcaataagatcccctacacagaacacgtagtcacgaccttcttcatacccagcaagtttcagggcatccatcatcatatcgtactcgccatgaatatctccgatgaagaagatattaacattatcgggcacagtaactgtttcatgaacgttcattaatacctcgtctctaaatagtaacgttttggcagcgagaaatctgtgggttgctgcctatgatctcttacatattcccctcgataggggtcgtatattacgtattgaactaggccttctggttcccaggcaatcagtatttcattgcctattcgtttaaatgcgtacccgttctgcttagcccacagtatgcacgagtagtctaggtttctagcatccacttttattccagagaatcccttctccacgttgtaggtgatgcctttgaccagtttatctacctgtatctttttattataataggcagcagctcggttcttgcgggccatatcagaagaccagtctctagagaatttctccatttagcactccacatcgtcgtgttcataaccatagttagtgcaggtgttagcttcgtcatcgtccttacagaacgcaacgtagcagtcaacaacttcccagaacgcttcgttgatcagagcattttggtgggttaggtctaactcatcccactcttcttcgctctggaagtctgtatgtacatgagcatcacagcctacagcgcctagagatacgacaataactaactcgtcctctaccatttccacgtaagcctctgcatactcccaggcggcttcattaacaagctggttcttctgggcagcatagagagcttgccactcttctcttgtatgccccagatcaacgaaggtagtaccaactgcaaaaccgttattcaggataagatatgcttgcttagtcattatgtaatcctctctcaattcaatataaatattatatcaaaattttaagcgtttagcaaataataaaaaaccccggtctcgtattgagccggggttaggtattattcttctacgtagtcgataaagtcttggatagctttactaactactgcagagcgaagcgtggcaccactcagaatgtgatgtgcttcttcacgtccgttctccacatccaccaggactactgcgggtacagtgcgaaggccgaacttacgtagggaatctacgtcgtccgtgcgtttttcaacgggcaggttgaactcagtggtgagcttatcaaaaacaggttcaaactgcttacaaggggcacagttagaacctttaaggaatacaatcttcttagacattattaatactctccaatagtgttttcattgtttttacggttgcggtatccaggtctagcttttctccgaaagcttccattacagcttcctgatacggctttttcagacgaccctcaggcactgctacttttttaacatctcctgccttgacttttgccaaaatagtggttaaagttggcatagaaagtttctggccctcaatattaacgccgagcagttcggttagcgcattgttaaggtcaattcgggtcattttcttaccgttggacataacaccctccgatttcttagcaattttcttaaactccggtgactcacgatcccgcagagctatatttaactcgtagggagctactttaaaatgctcgcacatctgagtgtagaatctgtccgacattttgtatctcctctctcgaatttataaatatattatacgctaaatcgagcagaaagtcaattgaatttttcattaatcgcagtacttgcctcgtcttacgaaaaatagtgtaatggggtagactgagtacatcaacacaggagaaataagagttaggatagacgtcaccccacctgcgtacattagcggtataaatgctagcgttatagctaggactatcataccgaataacaatgccaaggacaatgagaagcaattctctagacctaaccagagccagcaaaatcctgtccctctctttttctcacatggacagcgaaacacaccaaaaataccaaatacgaaatgtaggagccatctagcaaccctagctaagcgtgttctgcgaaaataaatggcaccgcgtattaaaatccatgttgcggaaaagaatactataccaaattgaaataccttgagtagcattatagttactaaacttgcaaacataaccacctcctatttgcttgctccatacaaagaaggggagcctaaaagctccccttaatgtcacagtaactctacgtgtccgccgtcatacgttccgcgttggatttcatcacggtagtcgccagagttgttccaatccgctccgaaacgaacggcgatgttcatttcatttgcggcctttttaaatgcaccgacaatagcccaaaatgcttctaagtcgttccagtcaattttacccttgatatacggagcgaaatcaatggctttgcccgtgacgtgcttagatttactgggatcctttagaaaagacgtcccattagcgatattttgagcactctgttctacggtacgtttaccttgaataatggtaaaatcgtggggtgatagttccagagcacgaatagccagagccttaagtttaggatctacagtatcgagctgctggagactacggtttccaaatctgaaactcatattgatctccctagtgatctctgctgtgatgcgcagatttttgccatatagtcattaaacatacccatgtcctcgtcttgtagggggtacttctcccacgcgacggcgacatacccagcgtagatgttattaaggttaaaatatgggcacgtgtacacatactcgaaatttgcactcttgaacggtggcaaacccgttccagaccatttcgataaaccttgtttattccttgcgtcgatcgcaaagtttagaccgtctaagtgagctcggtagagcatagacgtcttgtcaactgctttgtcggatacatcggatttatccaactgaacgttgctttcccaagctatgatagtttggtaatcatttatagcctcaggcttgtacttaaccacgaagacggcatcagctcgagtctgtgagaataggatcattgccttctctcgtgccacatttggaaactctagtgtgcgttgtactttaacatcttgtaggaccgccgaagtagagaaagtctttaagtacgacatgacttcactcgtattagctataaagaggtagataactagaccaaccagtaaggttagcaaacgtttaagaagagaagctggatccttcgcttcttgtagtaacagcgatatcaactgtataaatttatccattaagaacctcctctaaccatttataattataccctttattggaggaagttgcaataaaaatttatagttattgctcggatcatactttgagacaaatgtcaagtagaatttagataaagaaaaaggccagagctaaaaagccctggcctacttagttttattgacccgcagccttacgagcttcttgctctcggtgcgcagccatacgatctacacgttcgttgatttctttggaggtcagccaaatatccttaccaccttctatcatctcagtgatctcttctagagagaagaatggatagtacaggtctagcatcatatcctcgaagaacgagttaaattgatcagcatagtgctggatctcgtttttacccttaccatagtgcgcaccacgataggtatgacccatcaacataacgtaagggtgcaccagccaaccatgacatgctaggaagattgagcaggcagctgatgctgatggcccaaccaggtgcccaattacggttccctggcagttcatgataaggttgcacaactgaactgctgtatcaacgtacccgcctggactattaatataaagattaagagtgtctccctcttgcatagttgccagagtgactgataggtcgcggtagtagtctacatcgactatcggcccatcgagatgatagtgataaatattatactctgccttagtcgccaccagggaagcgaagtaattaggagtcttattgccacctttctgctctacgttattaatttgtcccatactgttaccttatataaagagaatcctctcgtcgcaaaacgcgtttacatttttacggaaattttccagtccgtcaaagttatttgtgaccacatcatcaataaactcaggtgcaacacctctagcagaggcatgagtagactgaatagcgtggatgttgttaggggcgtgaactttaagaatactagagttctgcgcaccggggaaattccgaactagagcggcttcattatcaaaacgaacatcagaaataatactaatgtcagctttggtagcagtgatacgatcgaccacaatatttaaccacaagttctcatccaccagagcgcgtcctaactccgtgccaacaaattctagcattttacgaggggacgtgtataatgggtacagcggggtctcgtgaccctggtaaaagtctggagcagtcttagcaatcaacggatatagtgttgacgcttcaaactgaggccaaacgtaaggaaaatcagcgtacttgtcgatcccgaaacgtttccagacgttagcagtacgctcgagggcttcctgagtcacccaaaaccactgcttaatctcttttgtcctgcgctctgccagcttttctggcgtgactccaaggattacagccgcgagttcgtaaactggagctgcaaaactgaatttactgatagaatactccggaccgaggacttcccaggcccaaaccttagccatgtcagcaaaggtgtctttgcctgcgccggcatcaccaactaatcctaaaacgtatttcattttgtttccttattgaacggtttgcaacgatattcattaagtgacacgcgataggtacacgttaatgcggtaagattggcaatgtaggtgtagacctgctcgttacacttgcccattgtgatccaatcttggtaaggtatgcgaacatacactttaccttcttcgtttatgaactcaaaattaaatgggcaagtctgtaggcttgctggccacggtaggtgttgcggctctatccccgttactgtgctacttgggtctggccgttctgcacacccggatgcgatgattgcagccgagagcaggagtccatatttccagttacgcatgaaagtctctcctggaattcattaactttgtcttttgccaccttggtagcaagtttaggtttagcggcaaccacgccctctttggctctagctgcatccagtttattaatacgtccatccagatcttcctggttcttagctaggttggttatataggtagtggtattgcgatctcgatttcgaatctctgtttggagattaccaactgtcttttctagttgttcattacggtttgatagggactgtaaagagctggacatatctgttagcttattggtaatgtagtaggcaccaccgaaggtgcccgccgcaattgccagaaacagaattgctccagtcttaccgctccatattcctgaaagaaactttagcatcgaagcccttagcaattaaccgatcacgatcagacgtagattcggtctttggttccccttgacccagcacaccgaagatataggattctagggtctggtgccagcgatacaggtttggatcaatttcctgccacgggaaatcttccgcatggaagttgaaatcagttttaacggtaatgttaaccgttgggtccgtcttagactttgcagcatcccatgccatcgcaatgggcttgttgaaagtctctaggaatttagaggccgtggcagttgcgttacgaacacgagcgtcgatcttctcaatcgtattcatgtcccaacccatccgcaggtagtacccttgttcttctagtacctcttttactttaactggatcgaaagtctggatatgcacagcatctgcccctaggccagtgtgataaccgtacagccagcgtagtgtaccacaaatcaatactggacggacttccagagtccccatattaacacctccatatccagaggaagtgcggttacgcaagatttcagcgtagaaaataatttgttcgaaatcagcggatacgtttacaacctctttcacctcttcacgataccatgctctttctgcatcgtacatagtaccttgtagatcatatacgtcctttaatttagagataatacgcatgttagttctcctctcatttataaaaccattatacaacattttaagcgagagtgcaagtaatttttaaaaaagaaaagcccaacacctttcgatgtcgggcttgggtagttagcgatttaacgggtggtgttccacacagtaatcgttaaagatcttggctcgcttgatactatccggtttatacttagcgaacggtcctttcaacgctccctgtatgatgaagatggccttacacagtctgccgatggtcttgcgactcatacagcggagctctgcagcatgcttaccgttacgaagctctaggatcttatcgaaggacttcagaacactcgatgcatctttggcaccgccttttgcgatgatggcctcgatatctttacgggtggcaaacttagccaggaactcgaaggctttagctgatagcagcttagcagagtccagaccatgattgataccaactgccatccacgccgatactgccagtataaataaagtaaacattttgcttcctcagtttgtctttgaattagttaatggtcagcgaccaactcaccacttcgttcatcgcgggcacgactccggataggaacaggaaggtgactcctataacggccctaccgttatacgtgtggattcatgttacacatcatacgagtcttttctacttcccgtcgtgctttgcgacgttgccgtcgtagcttgtattcattttcaataaccttatggaaatggtcattgatgttatcttctggcaacatcaaacgaattgttgccaactgctcgatctgaacccgaaggtgggagttaggcatacaaagctcttgcatctccacgaacccggataatcctagagcggtcatagaggctttagcgtatactttgtcctcttttagacttagctcaacggttatccggtagcgagagtcaaacacagtacaccactcagagggtactgccccggctcttgcccagacgcagtaaggagcttcctcaaaagcgcactcttcattaatccagtctagggtctcttgaagtttggggtgaagattactcatcgctatcatcctcgtcttctatctgacgaccatagcggtccagtgtcacagcaggcttgccgtaggttttgttcgtgtagatcttagtttccccaaaacgggtttcagatttacgaaacttaccagcttctttagtaatcccattcgttgttacacgaacccgcccgttatcagagatctctactttgttacgctctgcggccagagatactccagagtacatcatactgaatacgatgattgctgcaattgaacgcttactcatagtcttcaccttcgttatcttgttcatccacttcaccttcgaggtctggctcgcagtcccggcagatttcctctatttggttctccgccctttcaaaagcaggacaccaccacccgcaattcacgcaccggaagatctccatatcttccgcggtctgccagaagagatcctcgataacaccttcgtgaagattatgcccgttagccaccagctcttcttcgataacattgagagcctcagtttcgcttacacaggaaccttgtacatacccgtgcattaacgggcggataatgctttcgatacttagtttgctcatgaagctctccctatcaatttatgtaactattatatcgaaaaatcgcctacagtgcaactgaatttttcaatactttggcttcagcacgctttcttttgtattcggcagctcccttttcgagttccgaattaaggtagtcaaccatggtatcccacttgcgatttatccagtgacgagtaccgtaatgcgagaacacctgtacggtatagtctaccggactgccgtctttgacgctataccaagcctcaggactaaactgcttgaggtcatccagctgtggagttggcatatccagagctttttgatggtacagttttgtcaggtcaaatactttctgctggtaacgttcatggtcacgatagtagccagagagtcgctccactagtgattgggctgcttccagattactagaggttacaacgcaaatacgatccggcaacccttgctccatgaattcatgtactacacaatatccgagatccatattaacagctccagctacacttaggacacgggcaggacagtgcgtgtacgcacatcttgccgtctttatcaacaccagtaccgtgacacttggtacaggcagcatgtaaacacaccggtcgttgctcttcgactaacttcttaataaacggagcgctttcaaccattttgcacaattcttcgtgagaatatccaaatcctgtagtaatcattttctacctctgcgtttcggagtgggccaggaattagtcttgccgtgagtaacctcctggcgggagctacgtggcataaagttattaccaatcggatgttcgtgttccatttcccgagcgtaggattctaactctagaaagctggcttgggactctcgttccattctttctaggtcagtgaagctgggaaatccgccgatgccgccgtagccaataagcattattttcggcacctcgacattacgttcttccagtcgtttacgaacaagttctattgcttcccgagcaattttatcgtccattacgttcctccttcggtaagtaatcatgcagctctacataagagatgttctttctttctttatattctggtttaccatacataccgtgcacctctactaccttggcgcgacggggattattgaacataacattccccggtatgactactacatcacctatctccggagagtatttccaataactaggtacgcggtaaacatatgttctgttactgttggaaaacttaattccaacgtggcgagtagttgaagccatgatacagagccttagccgcctgccgcggcatgttaagtttttcagccagttcagaccagaagtctttaccgcttaccatgttatatgctacgatgttcccatcgaaatctttgagacgctcggcctctgcctctagagctggtcggttcttttcaacttcgagctgaaactcgttcagacgcatgaagttacttttgtcgcctaggaaccttacataggctccggctacaccatctatggaggaagcaccgcatttacaggtctgcattttgtggtcgaccaactctagggtgtcacggcagcattttacgaaatatacaactttactcataatcattatatccttcaactgtaaaccagcgtttaacttgtgtgaagcttacccaaataccctcatttgcgtcgctccgtaatttgtaccctgctctactatcgtgtagttcaacgaagtagagcttacccggagtgaagtattgaaacttgtgacccccaacaattttatactggaggccaactccaggagtgaagcgtaagagactagctttcaccatatttcttctccaaacgtttttcacgcagttccgctcttctcttagctacacgttctcgcagcgtgccgtgttctttctcatagcgcaggtgatgcttgttaaaatcacgcttcatacgaacagtatgccagtactcttggctagcaatgaagatagccgggcgagacagcctaggaacatcgtatagctcgaacatgcgcttcatttctttatattcggcatagttcataatacgatcaccgggagcaatctgattgtcccaaacccacttttcgtgctcccaatccgtatagaatgctctgataacgccaggggttacttcaatttcgtaccacgctgtcttagatacacgatcgtgatacagccctgggcggttgaatacggggtttcgctctttttctcgccaatcatagaatgtaccgtctaacgcttgctcaacagtgcgtcgtgttgctttgccccatatgtagaaggaatcaacaaggctagagcgaaagactcggataccacgtaaagattgcttattcattatttgatccccaatgcaagaagatggttagatagcttatccagggcttccagagcagctttgttgttttcgctcaagttgctaatagtcttctggagactatcgataacaaagtcccgaactgctaactccgcagcgatcgcagacttactattaagtccttcggcggtcattgcgttaacgtgtcgggtataataaccaccagcgaaatccagctcgtcaatagcacgttcggcgtaatgcaattcattcagttcattgagttcgttcattgattactccttatccatcatttcgaggcgttctttgacgtataccagtctgttgtgctgttctttcgctaactctgctaatcggtaaatatcggccactaactgcattgtatggtcgtccataccatcaggtggaagcgtatctgcatacgcagtacagatagcgataaactcttctgtgttttccattgttactttcatcttggaaacctctctcatcaatttataaatctattatacggcaaaattggcatttttgcaagtgaatttataaagaaaaagcccctcgctcaaagagacaaggggcttttgtttagaggtcaggaggtgcctcagtgttcttttctaaggatttttgtgccctcagaacaatctggtttatttgctccagagagtcgaaggaaagttgcaggccatgaccttcatcggtggcttgtatgaataaaactctcttagaggcgtctacgaagacttgaaattcttgttccactttactctccaaaaataattacaggacactggttttctctggctatacgagagacgtaagcgtttacgccgtacttaatagccaagctaggctcgtcaaacatgatgcagctgaatcgacggcctatacggtaggtttctagcatgctatacgttgtaattttaacgtgaggttgaagctcactatacttcttttctaggcgtgccatctcacggacgccggatgctacgtatactgcttgaatacctttaaatactgcaaactcataagcagtattaatagcctcaaacgtcttgccagtagctcgtcccggatctactgatagaggccaacgaaggtcaagttctaggaacctgaatagttggttacgatctatgtacatgctggctccttaaaccaaacaatgcgaaaacctgtctcgtcctctagggcctgtactatttgctctagtgtcataaccttatcggacgagaatgtccagagaaactgttggagttcactccaagactcggcctccataatcggaacaccgatttcctggccgaaataatcatcagtaccacgaacgtcaatgcgaccaccggcatatcgtttggcaaatacttttcgagttagttgcccgccatctgcaaaacgattcggctcggttacttccgtatacggaatacccatacggatgtaccaattattggagattggccccataaaattggtgctataagtgatcatgaccactcctttaaattggcaaaccccaggagactcgaactcctactgcacggttttggagaccggcgtgctgtccagtaacactcgggggatagaattagctgccgtggtagacagatactgtcttaccgttctgattcataacgtaagctacctcatcctctttcaagaagatatgctgatcaagaccggcaatagagatgctcttttgtttagggttaaacccaacgcttgaaccatcatgaatttcttcgccaccattcggtgacattactttaactgttaacatttgcttctcctatagtttgccatctctggctgttaagtgacgtcctaactactgtagagtcgagttccaggcagacgtcggcaccctggaatacattggctctacagaagcgaataatttaagagttaaacatgcggagacgcagagcgcgtactcgatctacgcaggcttccatctcagctaagagtgcgaacactagtgctgcatcaaaagttttcattgttatacccctcaagtagtatcgataaaatggccttaccggctcccagttccttgtttaattccccgcaacgtcaggggacggtcattttaccgaatttggagcgactagggggaatcgaaccccactcagtaccgcttggaaggcggacgctgtaacccgtacagttaatcgcaaaaatggtgctggcttccggaattgaaccggaatttaacgacaatgtaaacttagtcacactgtaaccataaccagcgaaaatggtgccccaagtaggaatcgaacccacgacctaccgcttacaaggcggttgctctcccggctgagctattgaggcaagattggtctcccctaagtgatttgaacacttgacctgacgctcccaaagcgcccgctctgccagactgagctaaggggaaagaatatggtggggttgctacttaaagcgtttcacgtaccatcattgctcgttctgctttagaagactatgacagcggaaaaaccccattatagggtatacatacggtttaacacttcagcatttggcctcatagactccgcctcttttcgaaactgttcatccagtaattctagacgttttctaaacatgtccttgtccttttcggtcaggacgatgtttttggatatttcaaatagttcctgaagtgtcatagtttggtacctctggagggactcgaaccctcaatcatttaagcgccacgttttaagcatggtgtgtattaccagttccaccacagaggtaaaaatacgttagcgcagctctaagccttggaagtagcgagggaacggagagcctacttcaaagctgatgccccagttgagttccaccagctctgacttatccaaaagcagatcattgccttcaaagatgtagccgtatacagttgggaacatcgctgctagatcttccatattggagtaagcattatgctcttcacggaattgctcaaactcttcaaagaacttctcaaggaagaactctggtacaatgaacgttacaacatcagtgctgtcatcaatacgatagaccgttgcctggaataggccgacaccgaccaagttgatagcaggagtagtaaagatatccattattaatataccttgattaaagtattgtcgatggtgttcaggaacttaactgccgcatctctattagagaatgtctctagcacgataatgttgttctcaggatcaccgttacgcactcgtatctggtacgatacaatcacttcccagcggaaccataaagctcgtggattatatcgcataagaattttttgattcattaggtaagccctctcattaatttatattattatattataaataagagcgtttagcaaatgaatttttcgaactttcgggaaaatgccaccctaagtcaatgccactacttgagacgttataggcattctatctcaagttgtctgccccattgctttcagtgatttctgcacgcagaaattcttcttgactggaggactttaccacgtcaaacggccggaaatcggtggcttattttatcctgtcacccatcacctgcttgtctgagtttaatcagagagcctgtaacgggctacttgggatttggaagtatcagttggattcgaaccaacgcaccggctaacctagagatcaccagacgtttccaagtctgctcactaacggccagctgctttaccgtgagccttaggactattcagctccataagctattgatactattaatttggtgcaaccggttcgatttgaacgaacgacccctggactttcaaaccagtgctctcacctcgctgagctacagttgcataattcatgcctgctcctttgaatcaagaagtccaccccggtctttgggtctttgcagtacatcacgctgctctgatgtttggtggaacttgggagactacgtgttacttccctcacagaccgggattccccgctatccatgatgcttaaccgattagctgaagtcccataatgtggtagaccgcccgagactcgaactcggaacctatcgcttaaaaggcgagtgctctaaccattgagctagcgatctaaaatagtgtttacttcccatacatgagcgtagcagcttttcgatactatatgggtttccgcttctgttaaagcggcttcaaatgtatcatgtaacgttgtaccttcgaatttaatacttgaatctcccgtttgggactctcttgttacaaacgccttatacttaatcatgagtacctcgatttggagcaccatcatggattttaaccatgctacgagggtttgcaagcctctgcctagtcactcggccaatgatgcattgtttaattagggcgcaccggagttccaccgattgctaacgcttcaccgcaacctaagtcgctgttcttaccctaaattggcggttcctgctggacttgaaccagcaacccctcgattaacaatcgaacgctctaacctattgcagctaaggaaccataaattgtttcatactttcgtcattgagtgaagtcagcaatgaggctaaactttggtctagcgtcacccactcgtggtctgcatttagtagaccatgaaatcgcttttctgcctcacgcacgtcaagccagaaagaccagtggtacattttgtaatctcttaaaggagagtacgtctggtactgagctaaccttttgtgtggctgagtagataatcctaatttaaccttacctggccacgctgggtttgtgatagcgtagataaaacccgctgtctcccccttatgaccaattgacttgttatatttaataagtgataaggctgataactttaaactatacagcatattagatcgtttgccaaagttacctgtaccacactttaagctctctaataggagttctttagttatactaactggttgcccagttagtttaagatgctgtgttattttgtcagagaacatatcaaataccttaagttggtgcactgaggtggactcgaaccaccgaagtcgcgatgacaagggatttacaatcccgcccgtttgccgctccgggaaccagtgcgtatttgaagaagctctcttgagaacctcttcaaatacctcgtcgaaacgagatatttgctaacttattgtgactagggctgacccttgtgtccgaggatacctctagacggtcatatctcttagcccagagagaatttggcgcggctaacgggattcgaacccgtggctccgacgtgacaggccggtatgttgaccgctgaacaccatagccgcttaatttgttattccagttcgtactccatcagatcgtctgactcacatatcggacactcccaatggcattcacttaactcaccgcaatcggaacaaatgtataatttaacttcatcttccatttgcttttcctctttcgtttcaatataaatattatactaaatttcagggtactaggcaaatgaatttttcattaatcgtcttcttcgtcccaggagagggagtgcatgaagatcggtagaactgtaggttctacatcaggcgacgggtagaagtaagttttaccttgagacaggtcaatgaacgtgggagttctaccctcctgcatgtgttcatcaaccttgtctagggcgtcgtttaacagttcgaagcagtcagtattcgctccgcaaacaacgataaaatccattaacgacccccgttcgggaaaccggaggcaagcaggaagcgaacaacgtcttccagagacgggccttcgccatcttcttcttccagatggaagggcaggatagcgtactgcatgtcagctggtgctaccggggtgaaagtaggctctgcgggagcttccgccatgaacactgcggttccgtcaaccagacgatcgatcgcttcacagacttctagctgttcttcgatcttggcctcgcgttcgcgcatcagagccagcagttcagtgcggtactcttcaatacggcggtctagagactcgatgttgttagacaggttatcctgtacaatcatcaggcggactacagcagaatttccattagttggtcgtgtaaacatgatatttcctcgattgattattagataaagtcgccggtagaggctaccagtttaatgcttttacggaagatttcgttcataccgtcgtgaaccattactgtcccgaccatttttggaagatagacttccacgtcaatagttccgtagggcatagcgtgctcgtcagtaagtttagtccataactccggctgaagctcgcagttatagaacaccatccactcatgatcgccatcccatccgtcccaattaagaaccagtgcggattcaatacctgttgcagtaacctttgtcattctaaaccccctgtatttggctcagtacaatcctacattctttatcctggaacttgtgcgctcggataaactctcttaaaacgtctacgtctttagggaaccgcgagaggggcttagtataataaaacggtttattataccctgccacaattacttttatcatacgttgtggattcatttgctaactcctctcattaatttatgaatctattatagcaattataagagcgtttagcaaatgaatttttgaattatccgctccgaagagcggtaatccaggcttgcagctgttagttacacttggtttgaagtttgcgagtcaaagcgaaaggggatctattccttacggacgaaagagttccaagcgctgagagctttcagggactgaaggttgatagcctccccgtttctgcaactaacaaatcttaacttgaacgtttaacgtggggattgattagccccactacacgctaaccccggaagggatcgaaccttcacaagatagaccatttatctcagcctcgttttcgggtatcttatgcagagtggatgttctgcttacgccctttaggaagccccgtataccgattccggcacggcatcaacgcgctagggcaatgaccgtctaaagtcctagcttctacatttatactcctggacggcatggagtcgattccctagacttttactcagcattgcgccaaaacctgtaaaggtaaggattgggtattcttacgaatctgggatcgtccccatcagaaattacagcttctcggacgtttgacggccctgactgaagtctcactgtaaattggtacttgctactgattttgcaccagctaccatcgacgtgtaaagacgatgatctcccgattgagctaagcaagtatttggtggtcaatagtggattcgaacccactggtaatggaatcaaagggcgttatgttaaccagtacactactcttaaaaatgccattaactaggtgctatttctatcggctgagatacagtaggttgttctaatgtatctggtgctgatatagagaaaagagcctgtaatgctgcaatatcgcgctcgtaagtatcaatacgagtagtaagagtatctaccatctgtttatggtgggctaagttattttgagactcatctcgaagagtctgaagttctacaagacgtgttaacataatttcactaagtaaagcattactcatttatttctcctaagttttcgggttcttctaaacgtttgccttcatgatctactcgaataactccgcatccttcacaaatcacaactgcaccataaccttctttgacttcggcttctataattaaaccagaaagatcaccagtatctctgctttaaccgaagtctcactgtaaattggtacttgctgctggtttcgaaccagctaccctcgccgtgtaaagacgatgctctcccgattgagctaagcaagtatttggtggtcaatagtggactcgaaccactgtagtctcacgtatgaagcgagtgcataaaccatctctgccaactgacccaaagaatttgcctcaagaatcttacgctactattcttctcctacctatacctgttttgcccacaaagtaaatttgtctaggcttaacaggtaagtactatactacgtaccatcgctggaggatattccgatgaaatatcctataggggggcaaaaattggtactccgaactggactcgaaccagtgacctaacgattatcggtcgtttgctctaccaactgagctatcgaagcattattgttcttgctggcggacgcagatttcctcgtccgggtgtatttgagctattctagcatcttcttcagcttccttgtacgtgtcatgaaaagccggtgcccaaaatacgatctcttttgtgtgggtattaattagcataccttgatagcgaatcatagttacctcaacgtttaccgtttcgaggtgctcctggacgtctagcagcctctgccattcgtttcttgattttagcaatgttctctggtgtttgttctgacttgcgtaagcctgtcacgttacaccagttatcaccatcccaggaagtaattagcattactccagtacctagtactcgttctgtgaaagagattttcatcatcttctcctagaattggatgctccggcaagattcgaacttgcgatctccagcttatgagactggcgaggacggcctctcctctacggtgcaattggcaggggcaacaagaatcgaacttgtgacctaaggcttcagagacctccgctctacctactgagctataccccaattatgcgcactctgctgagtacaacgttgtgtctagggccagaacataaatgcttgcatttatgggaggcggctagaagagggatgtgacccagagggctaacctcgtcactctcagcagagattttatggtacaccatcgaggaatcgaacctcaaccatagagttcgtagctctatattctatccattaaactaatggtgcagtaacctggagggatatcttggactcgaaccaagatagactcgatccacaatcgaggtcattatccagttatgataatatcccaaatttgagtaccatcgagggctgatcagacctccacaaatagtatgtacatcgcacacactatccggttagaccgcgtattggtacgttgcacttcgtgcagcatataactccagcaggcgactcatcgaacgatgatactcaaatttggtggccctaggaaactcttcccactaacaactagttgattacttctggattttcgcccagaaaattctctagaaaggggcaaccgttactcgtagggccattgtgaatgggctggtctctcagccacggttactacttgatccttacgatctgacggcaaccacgtgcagcgacccttcatatattgtatagtgctcagaaggtcattagaagcactacaactttcgttgtttggcggaaagcgaaggacttgaaccttcatgccctttcggactcatcattagcagtgatgcgtggctaccagtttcaccagctttccagttgtttggcggagaataaaggaatcgaaccctcaccgtttccgatggcgactgatttcaagtcagcttgctcccatgagcactactctccagttagtatttgttctacttctttgcgaagttcatcaggatcggcatgatacgtaatctcccagacgtacagaactccgttagcacatgctaagtcgaagatctcgctttccggcagcaccagtcccatacacttaatatgaaactctagagcttctttactcggaaaggtatggactttacggaactcatttgtcttacgatccaactgcatgatttctatgttcatcacgaactcctgttatttggtagggatggagggggtcgaacccacacggatatttcaccactagaacctaaatctagcgcggctgccaatttcgccacatccccatttatttggtggaggataacggatttgaaccgttctgattcccgcattgcaagtgcggtgtccactcccagcagacccatcccccaataatttgttaaggcaattaatccggtgcgcgtaataccctgagcaattagccatgcaaggatacccgctcttcacaaatacgatacactctacgcttaccaggcgtttcggagagtcactccgctattcttgcgaaccctcagtatacaatgaccgagcaagctgcaagcgtgttttttggtgccgactctgtatcagattaattccttaacaaactatataaatattatatcaatttgttaagcatttagcaactgaatttttcagtaaatttggtactcccgacggggttcgaacccgtgttcccactgtgaaagagtggtgtcctaaccagcttagacgacaggagcattttaaatttggcaagggaaggaggagttgaacctaccgatctcggagtcaaaggccgatgccgtaaccacttggctattccctttcaatataaatattatctcaaattctagagcatttagcaattgaatttttcaagtattttggtagtgacccggcaacgcaggtcactatgcaaactactcgccgtggtctacacgaatgagcggacaaagtttgtccttcttatagattcgcatcttctggtagatgttaccgaagcgaagctcttcatcgcgagcattatactctttctgtgccctttcaaaggatttactcgcgttccattcctggatcctatcccctatcttagcgcaggtccagccgatcccagctatcgccagcagaatcactactatcgtagatagccctgctagacttaaccctataagcatgtaccagggggtaattcccagctcaaaggtgagacccaagaacgtagataagatacttcccatccccaaggagaagagtacagcaatagcagctacgccaatctgtagcaggaaataccacactgagtgccaaaataggctacacaaggtgactctgttgtcgttcagccgataggtgaaagacgcggaagagaaattaagccacttgtagaaaaaacctttacgtttaatattcagcatatttagcctattacttgagttgattgattaggaaaacttgtagcgcgataatgaatgcggcataggagtcagagcctttaccaccttcgttctcattaacttcttttagtagggcttcaaaagttgccttatgacgctcatagtgccccctgactgtcgggccagcatcctctaacatgcctagaagcatatagtactgggtttgtaattgggcgtccattagtcctcccacacgattttaatcgagagaagacgatttacaggaatgaccagcatagtttcagaccgtttattaaggatttccaggatatccccatcacgatggagcagacgtttagggctgatatccgttactgtggattctaggacgataccattatcatccacaaaggatacgattgcgtttttagtagacattttagtctcctgttatgaaattggtgggccaggggagactctaactcccactcgttggcttatgaggccactgctttaactttaagctaccggcccagagaaaggctatttctaacccttatttagttatactgctgcttcgtctttcggagtaccttcaactggggttcctcagttggagtatcttcaaccggctcaggatctttcacgaagcctgcttcttcatcggagatcacatacagatcctgaatatcctctgtattgatcatacaagctacgctaccatctttatagaagacggatttagtgccctcgttgcgagccatattcgcatcgataaccagctcagtgagaacttttttttttttttttaatattcaattttgtaagccattttatcctctactttctctttgatttaaagaactattatacaaaattgcaagaaaaattttgtagaatcaatctcagtctgcgccctgcgggctttttagcgatggctacaacaaattacgtgtgacctttcgctgcttgtggtggtaggccagttagcttagtaaatcgttttctaagcccattatccgataaccctagctctttagctgcccttgtccatgagtagttagatacccaatatctaatgtcctcctctgttatttcagggaatgataggggtttgcgggttttggatattactctagtcctgcccaagtcttctagggttttatctatgtgggcttcttgcgatagaacctggagattacttagtgcaaagtctgttcttatcctattaatgtgatccacctctagtggtgaatctaaagtaggtaaatctttgaatataaaggctagtaatcgatgtactaataaatttctttgcacacctttctgttgtaatttgtagcaggggtaccctgctgtatttataaagtacttgaggtacttgttagacctgcgagagaagatactcccgtcttctcgaaggaagtatccagggtattgtggtatttctattagcatagttaatttggccgaggcggcaggattcgaacccgcatactccaattactcgattaacgacgggttagaagcccgttgagatacgccccgaataattcgtttggttaataaagtttaagcgtttttacaaccagatcgtgaacctgttcagaataccggccaacgctcttatgcagcgactctttaaactctagagtgcgcctggcgattagctgtttctgttcaggtgtcagattaggtgctggacgttcatacggaggagtatgcacagatgccaccattattagaccttaatagagtttttgagacgatcacattcagcagcgaactggacgtttagggttttgattgcgtccgtacactgatctatttgtttgtctagagctttgataagccccagcttcaccatatcgtaacaggatttcatttcgaaagtgtaatctcgagtctggctgccacacaggtcaaacttaatatccccggcttgcaatgtgaagcgtttctgtgtaccaccactgatgatctgtttagccttagtcagctcactacgacgagagaccatagactcaatatcagagcgtaccttagttaacatacttaaatcgttcatatagacctcgtcaattagtatctttaagaactctcgtgaaagctcttaaagataccgccagtaggtaggggccttcccctgtttaagctatgcggcccttctgtcagacgtatcttccagttatagtcaaggtgactaatataaaccccacatagtttccacagcggggcacactccaaacaggggcacttctagcctgtgtaagggtgctataaatagtggttatgctttcgctcggggtgactccggtcatgactccattgtcacatgcttacacagggtatacgagcttccgcggagctgtatactcagccgtgtcccacttaggtctcggagcgaccgtttgtacgaacggttatccgaatactctttcccacttagagtcaggcgagatcccacctcgccaaagttcatacgatcatcatgccgtatttaaggactagctttggcacctctggagagccatcctccacgcggtctgttaaaatcacacctccgaattttcgatgtgaagttttgatagcttgaaaaacgactcctcgtggaggaaaaacttcactatctaggctaccgcctaaagttcttctttttgatttgggcatatatcaggtaagggtagccaaatcagcatcctagtccttcgtggtttagctgtttcgttcccgcgagtctcccaagtcttttcctgggaggggaggaggtactccagcagcgagtggttcgccaatagaaccatcagttatctagctctttccgaccgcaggacttgaacctgcatcttccggcagttacgccatgataatgcccgttatactaggacggcagtgttgctacataagtgatttcgacaccccactatggtggcaataaccagcaccagacgctatacacatgtctccaatttgcaacctaggcaggtcagcgtgggagctatacgagtttctcaggctcagctccccacctctccggcaggccacgcaccatgcttcattctggtcgaaccagttaaagtgagattccaccatttttctacaaattagaagaagagtttaggagagtggtttcagacgccacattttacaagagatctctaacctacgcccgtccaatacgctccctggccggtatccggactggatgcacgagctttgtcaggtgatcactcttaactcaccgattctattcaacgaatcttaatgctcgacgagtcttacattaaaacaagttcagcgtaatcggcccgctgttctctctaacttatgaaactattatatcaactttttaagcattaggcaactgagattttaatttatagaacacatggttgccaattttacttgttcttttgaagtccttgtcctttgtccagtaaggtttagtatccttactgtgaaaatacaaggctcccttcgtcggatctactggaagatccatatagtaaactagtctagctatctctttagcttgtttccactcttcgtctttacgatcgagtttatgtttctttttaccaacccagctgaactgccctggttgatagactactttacaatatgtggacgggaattttccatagttaacacgatttttcgttacttgtgcaactgcggtcattcctttaactccttcccctctagcttcaaagtacacatttttagctatgcactctatctcatgcgcatcaatctttgcctgcgcatggaagctagtgaggatggagatcattagaatggctgctttcattatttctcctttactctttgattcaagaataatagtatatcaagaaatcagccatttagtcaaatcaaattttcaatttcgattcgatagttttaatacagtacgcttctaccagggcgtcaaacaccggatcatgtttcgacggatagaccccctcaggaatcaggttgtaacgctcaattacgtcgtgtgcgtagatttcagcacagcgtaccaacgctttccagtcccctccgagagcctcgaaatagtcacgcgggttacgggcgctagagatatcccagaatttccacggaacgattgcaggatcagacggagagaagacattagcctgggccgccactgtttcgtaaatagacatatcgaactgcgggccattaccgtagtggcgcagggaacgagtgtcgataccttgctcatcgataatgccttcgattacctgttttgcctctacgaacgggcagatcagatccatgaacgtatgcttggataccggtgactcatgagtcgggttgcagaccagaacagtagactcgccgtctttagcgttcagagcttcaataatggacagcgacgtagcactaccagcacgagcctcattcatccagaatgcaatagttccggcggacaccttagcaccgagggccaactgctgggcaacgttaggaacgcctaggacgatataaggatctagcgatagatctttcatcagtacgaaagcgaaagacggcatagcaataaaggtgctcttgcaatctcccggagttcccagagattcgatatcgcaaacagagatccagcggtcttgtaagttttgcatattgtttcctttgttattaaagttgcttctagatgtgttatcacatttagaagccacctccggtggtggcttagtcatatcttcggacacatcccagttttcttccatagacggccagtcagccgcccaatcttcgagttcttcgtagcacgagtccatcagttccctagagttgaccctagagtaatccagggccgacttatgtgtcgctgcacgattgaaatcgtttttagctacaaaatttcgcattatgccttcttagcgggtttgcgtttttgattacggggcttatttgccttgcccgtaaatttaatacctacgccatagcacagagcgcgaacattctcacggctgtattcgcaaccgaagatattcggcttgacgctaccgaaacggccctgggtcttgcgcaggacttctttggtgtctgccttatccggcgtactccaaccgacgatcttggagacatagccagaggtagaacccttagttaccggcttcttacgacgcggggccggtttacctacagctgatgctgcttgagtatcagccggatgtttacgcagatgacgctccagacgtgctttgcgattcgcttcagttttgggaaaagttgcaactttggtttctactgcttttttagaggtctgcttagccatgatttatttcctttgttttgattggtttcgttaatttatgaatctattatacgttaatttttagcgtttagcaactgcgttttttcattttcatctacaagctcatcgaagatgatgaactcgtacctgttaccgcccgatgtgcttcgcttgctcttccgagctgatgtactggtacccacctttgttgtacgctggtgctgtacagagtttctttcgctcaatttctttaagagcggctcgttctctttcagccatctcaggatccaggatttcccgtgcctgcggtcttggtggtagacgcgtagagggctccccgattttgacgcttccagaaacgcggcgtagagatcgagctggtactgtggtacgtttgggaacaaatccctcaaatctggtgccattataattcatctccacccctcagagctttccactccgcttcaaagatttgggcttccatacgtgcgattcgcagtttcattactactcgatccacaccaggctccatcaggagcacttcatatttcatttcgctaactaagcggcgtaaattctctaatatcacatatcctccatttctagctcggtcatgcgaacatttagcagattatctgcggcctcattaccttctacaccggagtgtcccttaaccttaacgaaagttgggatctcattgtggtttagacgatacttcttgagttcgtcgataatccacttccactggtctaagttcagaggtgtatcaccgtctgccttcttccagcctttacgttcccaaccccaaacccaggactcacaaccattcttaacgtaggttgagtccaaatagattgtcattggtcggccagggtttttgttagaccatagcagagcctctaggactgcttgaagctccatctcgttgttagttgtgttgcgtttgggagcagacttggtgccgatttgctcttcgctggagttgtaaactaccatagcccaagcaccaacattgtctacaccacgagtattaccgcggcaaccaccatcagtataaacatgaaacattatgcgtgcccccaagaaatggtaattgattcagtatcacgttggtcaaacggatgatttacttttacttcatagcccgcgtcctttaggtcttccataatctgagaccgtgcggcgataggcagaccattcaatgcgtaagaatctacttctgttttacctgaagaagctgacccatcaatatttgatataatagatctgtgagctgctataactgccatatcgttagaccttttggctttagctgccattgcttttgcatcagtaaaagacatatttatttcctctctcaaatttatgaatctattatattagaaattcacgtggtttgcaaatgaatttttaatataagtggcccgaaggccaccttagttatagtaatttagctggaggaaccagtaaattactgttatagtcccgcttggctggagggttttctttaggtggtttaggggcaaactgacgcattagtgcgtccatgcccttgtactttaccatccctaggataacatctatgtgtaacccagaggattgaaccagaaacttcagctgagactcctccctttcggagaaggttattttggggcgtctgttaaataatcccataagtcctcacgcagtgaacggataggcaatagggtcatgagacttatatcccacgattttaaagtcgtccttagaaacccaggtaagtacgtcctctagggtttttatctccgggttgatctctagacgaggagccgggaaaggtttgcggtcgaattgaccatgttccatgagaaccttgtactgattctcgtagatgtgcatatttactatacgctggtttgctctgattgcccggttccctgtgatctgggccataagcgcgaggaacgtgtagcattggaccatgttaaaggcttgccccaataggaagtcattggatctctggaaggagtcgagatacagatttccattgagtagcgagaactggtgggtatgcatgcacggtcgtaagcacccttgatcaaattcgccagggttccagaaggtgagaatctctccgcggtcatcaatgcctcgtcgtaaattctcatagatcttatagagttggtcaaagtgggaaccatccggtcgaagccacgttctgccctgtactccatagactctacccatatcgtcggttccctttctgttagggttgaccagccacgcctcgttttcgttggcgttagcgttccacgtattgcagccgatagcacggaattgctctgcggaatcatatcctcgcagatatccgataagctccatgatggcctgaagggcatacgctttacgagttgtgataagtgggaatttctttccgagtacatcatattcaaagtttgaccctattacggttaaacaacgaacccccgttcgagggttctccagccagacaccttcttcgagaatgcgtttgccttcattaatatagtgaatcacagatagactccttccataacaaaacgatagcgctcattttccccagaagctacatgagttactacagcatccggaggggtggacgtaagtatcgggtgttccagatacatgatgtggtctaggcttggtactgtaccagccttaggataaatggtggagcgataaatcgcatccagacagcccatagttgctagagtttctagcaaagctttcccgccgatgcagactacctcaacttcattacagaagtcccgaattttggaacccaagtgggtaataaaccgcacattacggggagggttttttatcagaattggggatgccgaacctactacgtacaccatggatttcttctccagtgcttttttcagtcgggcaggtgccgttgtgtaggtattatggcccaggataacaacctgataggtatccaggattttgtagaactgttctagctcctcggggatggagccccagggaagttccccgtaggcatccattgtagccggattaaaaataccaaaggctccatcaactcgcattgcgtataaagctgtaatcattacaggaactctccaaattcgtcagacagatcgtccgggttagcctgagaggttgcaccaacacgatagttggtaatctgtgcttcttgcggagctacttgctggttcttggtgttcagccaacctttcatccagccaataggatcttccataattaccgggagatcttccggccacggaatgttgattgccataaatgccaggcgtgcgttgtagtacaggtgctctaccagcaaatcggcgttcaggcctggaatatcttcgccttccgggaaaatataatgcgcccagttaatttctgtctccagaatactgcgcaggatcttcggagcgttagcctgagctgctgctacaacatgaggaggaaactctccactctgtataatacgcaggacttccatcgccataacggtgtggagcgcttcgtcttttgcgataagctgtaggttcttagcgatacctgtcagaatatcgttctccgccagagcaaaggtacatgcgaacgaggcgtagaacataatggcttctagagcgtatacagcgtagtagaactccaggattttctgctgtaattgttcggtaagtggattcagatcagcatataaacgatctgagatctctttaatacgtacctgttcctctgcaatttcgtttgcaaggaaggatagctctgccttttctttatcagtgttatcaatgctctctaacgcattatacttagaaatgcagtcattaaggttctctgaagctaactgaatagttgcttctacatcctcacgttctttcagccagatatcagcaagtgctgccagctcgtcaataacagaaaccggcagtgctaaacgtgcgaatgcttcgtcgttagcctgtacagtcgcaatgaagtcgcccggattagggagaacgttgcgaataatgttggaatacgcacggctgtgaatattctcaaagtaactccactgaataagcatgccttccagctcaggacgagataccagtttcaaaatagcatcttccggagcacgggtgataatggagtcggcttgagtttgccaggctaagttcagcagggtcttgtttttaatatgctgaggcagattaggccattgttttttgtcgttttccagggagatttctgtctctacccagaactgagaacgctgtagcagcgctaagtcttctaagcgctggtattttacgttgacatagtcggcaatcccaagctcttgacccaggaatagtttagattccttgtgatcccattcgcgattaaatactgtagacattagatttctccgttatttgcaaattctccatgaagttcggctaacttggagtctctccactttatagcctcttcaagagttttcagtgtttttgtgtatgatttgccctgcttcccgattcgtacttggaatgaattgcccttaggtcttatatttttcataccaaattcgttgtcactacgcactctagagttcatagaattttgggagctggtggcttttctcaagttatcccacttacagttacgtgggtcattatctttgtggtctatcttgccttctggtaactctccagtcatatacagaaaagctaggcgatgagctaaatactgaatcccgtccactttaatgcgtaagtaccctagatggtcgtaagttccggcctcagcaccccaatacatcttgggcagcatctttctaggtttccacgtgaaaactccagtagagggatcgtaggagattagctctttaagttcttctctcgatttcatgtgaatattataacaaaaaatccaacctacttgcaaataaaattttgctttcggttggatcgagcttaattacagagtacaaccgccactggaacaaccctgctctgctgcagagcctccggtatctacgtcaaagtttgcgtagtagaggttcttaatcccatatttagtggagttaaggagatctttgataatctcagtacccggaataatacctccaggatatttgttaaagtcgtagtacaggttggcactaatagcctgatccgtgaacttctgcagaaccgctaaccacttaatgtgctcagtacggtcaatatcgaacgcgtacttataggactgcatggtgtcccaatcgtctagacccggggctacggtgattactttgttaacgcccgaggtcttgatagttactgcactgcgaggaggctctactgcgttggtaacaccaatcagtacagagctagactcacccggcatacttgcggttagaacggagttacgcataccatgcgttttgatctcttcgcggagagactcccagtccatttctagacctacggaaaccaggtcatccacagtcttcttgtaagtatcgattaacagcgtaccatcagaggtatgggtacggtggaaccactcacatgggccgatctcttttgccagacgtacagacgctttgtgaaggaagaacgatgccttctctgcttcacggtggatccagttacgggcttcttcgccttcgaatgccagaccttccgcggccatagcccctgcggcgttcatcagcccaatacctacgttacgacgccgtaatgcagtgtacttcatggctgggaatggatagtgctgaatctcgatgatggtatcaacgaacttcaacaggatgtaggagatcttctcccattcttccagagttttgatacgacctagggcgaatccgcctaaattgcacagagatacttccccgtattctgaaacatccattttactcagctcttcgtcggaacggtataaatccaccacatgggggatcgggaacgttggctgtacaatctcaacacaaagattggacatgcgcaccggatctttaaagcgactgttacggtttacttcaccagcgtccatagtgtacaggcggcctgtttccatgcgtacagttttccagaactccatcagctctgcggcaggaatcaccggggctacagggagaacttcacccttgaacccacgtttggtaacgcccgctagacgtttttcggctgcgatgtacaggcgttcaaattctgctacatcaccagagtcaaatgctgcgtatacttctggagcgtacaggaagctcatcagtgtgatgttctctttacgcaggaagcgtttcaggagaatactgttaaacttcaggttgtagtccatcttatcgattttcttttcatcaggggaacggttgctcttagcttccattacctgaataatttccggatcgaaaaacgcagtgtaaacggttgcagaaccgccacgggactgctgggtgttagcttttacggagcggtcgatgtgtcgataatatggcagttttccagagtgtgggaacgcgccttttcgcaccggatcagcaattgatctactctcaagatgatagccgatccctgctcgggcagcgaccattttgaagacgacgtgctctgctgcgtcaatggagtccagggtgtcagtaccatcaacaagacagcaagaagcgaagcccctgtcagcgctccgaaggcccacgagcggcggagttgggacgttgattttctgtagcgacagcgcgttataaaggtcgattgcatcgagcatactccagtggggttgagaaagcattgccattgccatacccatgtaggcaaactgcggagtttcatagatctcttccgtatagatattacgtctagagtatttatccatgaactgcttcagaccagcattagtgaatagttcgtcacggctgtggtcgataacttcgtttagagcttcaaactggtcgtcagaaatccagctgctcatatcttcccacgctcccagctctaccatgtggtcgtggaagaaacgcagagacggcggggtgtaagaatcaaacaggttcttacggagctgggctaaacgcagctctagggcgaatcggtcgtaacgatgatcacgctcgatcattgattcagcagacttaatcagcattgtttgcagatcgtctgagtgtacatcacccttcggtaggttcttaactgcggctaccgctaccggagaccacggcacatcgcttcggataccgatgtattttgcccagtcattcagcttctgagccatgaacggttcttttgtaccgtcacgcttgataacgtattcaatacgttgggtcattggtaactccttttggaagttgtcaggatttaaaagatattctactttgttttcggccattttgcaaatgagattttacacgttaatcgtgtctggcgaattcgccatgtatttggtttcgtagagatatagcgtattcgttagcttcttccggggtgtcgaagccgtatttatcaaaacgcttattattcatatatacttgtactctccacttattgccgtgcttggatactcccttgtacccagaggtattattacagtatgaagacttattagccctattttgggccaatgtagacggccttagatttgagggaacattattaagtgtgttacgatccttatgatcaacttccccggattcaggtaattccccataatacataatgtatactatgttgtgtacctgatatctttggtagttgatacaaacctgtaagtagttattagcttttccagtcacttccttgagcttacctgacttttgttttctatataatttaccagaggattcgtctaggtgaaagagggcgtctagctcctctttgctgggatatttgatttttgtcattgaaacaaccaaaatttagagaataaaaacaggcaacccctttcgaggctgcctgtgtgtcggtctactttaataaaagtgtaattttttcattcgactaactaactctttagtaccgaggggttggttaggaaactcgtttgctatcttgaaagcggcatggtgtcgccgctcatcctcaggatagttagcattgtatttattgactgttgccagggatactggatgcactttcgttttacgagtgcggaagttgttcagtgtaaatacgttgttcatacgcgctcctagagttagaggtcaggacgttcgtcgtgagaagtgataccttcaccgaagcctacaaagccccagttttcttcagaggtaataccctcaccataaccaatgatcagttcagtaaccatattagattcccatatcgttaaagattgcctggaatgctttggattcagcggaacgcacgttatcatgcaactctactaaggagaatggcacatgttcgtactgatcgtagatatccatgatcagttgcagaccagaatcggatttaatgtctttctgcgctacgtcgccacagattactaatttgcaatcctgacctacgcgggttagaatacacttcattgcttctacggagatattttgagcttcgtcaacaattacataagaattgttgaatgtacgaccgcgtgcatgttcgatagcaaggtatttaattgccttgcgttcaaccagcccctgataagaacgttcccctaaggcccacttaaagccatcggcgattggttctaaccacggtgccattttctcgttcagatctcccggcagcatccctagggatttgccaagaggttcgttaggtcgaacaagaatgaacttttcgtacacagaacccggctttgccaactcttgagcagcgagaacagatgggataaacgttttaccagtacctgcttctccaataccaaccgtcactgtaaagttacggatagtgctgatatagtgtttttgctcagcgttcttcggcttgagttcttttgcggttggttgaaaacgctcccgtgcttcaaaatcaacagggatgacgttttcgtgacgttcacgttttgcgctaccgttacggcgcgactccttacgacgtgctgcttttctcattgcgatctccttagaggtctacagagggtcaaatttcgaccatgtttatcaatttagaataccagtataccaagttttgccgtggattgcaactgaaattttctagaatgatacggaggacatatcctttcctttattcgcgcgatgcgcgggcgcacacgaataatataaaatgggggagataggcaaataaaattttccggtttttattgttttgatgatccagatcaagttactgttgattataataaaatagggttgacatagttgtgtctatttgatataatatatgcctaactggaggaatatatgaacgaactagacctgattgataatatctatagtatcctcgataacgagggtgaagaagaccttatgtttaataacgccaataaagcaagcgagcaattccctacacagagggacatgatagctggagaggtttctaaatatgtggtagcgcaggagcttccggcatatctcttggcggcgcataatagaggagagatacacattcacgatatggactaccgcgcacaggggtatactaactgctgcctggtggatttagcggggatgttcaagaatgggactaaaatcggtggggcagagattgaaactccaaagtctatctctactgcagctgcggtaactgctcaggttattgcccaggtaagctcgtgccagtatggaggtacatctatcgatcgtattgacgaggtatttgccccgtatgtccgtaagtcctacgataagcacttagctattggccagcgttggctgcacgatagtaagaaggctgcggtatacgctaccgaaatgacggagaaagaagtatatgatgcttgccaggggctagagtatgaagttaacactttattcaactccaacggtcagcagccctttgtgacatttggattcggcctaggggaatcctgggaggcacgtatgttgcagaaagctatgctggaagttcgtatacgggggcttggtgcctcaggtcatactgctgtatttcctaaacttattttcgcagttaaggagggactcaacaagtccccaagtgatcctaactacgatatcaaacagctggcgctcatctgcacttctaagaggatgtacccggattacgtgagctatgaaagagtaacggctgttacaggtgattttaagttccctatgggctgtcgatccttcctttcagctattgagtctggggaaactgctgggcgcaataacctgggggttgtatctattaacctgccgctagttgctgtagagtctgaggggtgcttcgataagttctggaagctgctagacgagtacattgataaagcgatggctgcccacgattgggctattgagcggttgaagcgtgtgcgtgctaaacaggcaccaattctctatatgcatggagcctttggtgtaagattgaaagccaatgatcttgtatggcccatctttgagggtagggcatcagtgtccttggggtatatcggcattaacgagctgatcgaggtaatgtttgaggataccgaccctatgtctccacctgcggttgaattttcggtacaggttctcaaccacatgaaagaccgttgcaacagaaaagctgaggaaactaatcttggattcagtctttatgctactcctagtgagtctctatgcaataggttcaacactaaaattgccgaacagtatccggaatatgactggctaacggataagggctatctgactaatagtcaccacctggatgttcgtactaaagttgcccctaacgtgaagtttgactatgaagctaactttaccaccatcgccaatgggggtaacatatccttcgtggagcttccggaaatgcgtaagtttatctctgcactagagtgggttgttgactatggattaagtaagtctcactacataggggtcaacattcctgtcgatgaatgtgaggagtgtgggtacctaggggagtccgtatccggagagcacggttttgtatgccctcagtgtgggtcggggaatatctcggttacccgtcgcgtttgtgggtacttgggtagtccaggtagcaggccgtttaaccccggtaagcagcaggaagtaatgcaacgggtcaagcacatgaatttgaaataaatcacttgctaaacacctccgtttttgatatgatagttgtaattgagaaacggaggatttatgaaaatccataaaactgatgaaaagcgtatctactttatgatggactctggagcatacggatctatttcccgagaagacgtggtaaaacttctgcgatgccgtaaccacttgtggaaagataaagtcgatcccagaacctctgagtgcttgtccgaaaaggctgagcagttgcggaaagaagaaatgagaaactatatggagttcctgtaatgcgtagattgattatcgtaagtggtgctggattgagtgctgatagcggagtgccaacgttccgtaagggtgccatcactcccctgtgggataaatacaagctaaccgaagtatgcaacattcaggcgtttgataaggggtttcactatctggacgaccctatgcctccgttagaagccctttctgagggatctgatgatgagcctagtcgcaacctgtacgagctaactcatgagttctacaacatgcggcggcaggagctaggtacggtggagcctaacattgctcatttgagaattgctgagtggtatgagcgcttccctggtcaagtcgttaacttcaccactaacgtggatgatctgctagagcgtgctggcattccccatgatgatgtgatccatgctcatggctaccttacggagataatgtatcgccgaggtaaggatgtgatcgtggaagatatcgggtacactgcggttgattaccgtaagtatgagtgggttaagcctgcaattacgttcttcggggaaactgctccgtggtatatggggcaaatcaacctgtttgataccctgacaactcaggatctggtaatcgttgttggtgccagtaaccaagtaatcgactttaattgggaactattcccggcccatagtcgaggtactaaggtgtgggtggtaaacaacggtattaactacctagagcagagtttgtacgaagaacgtgggatccctgtctggtatgatactgctgctaacgtgttcagcaacaaacatttcataggtcaagttgaggcttggctggaggagaaaatttatgtaccatcccgatgatatcctgttatggcctaacggtagttggtgctaccgcagtgatgtacaagatatgagtcacctatcggacgactatcaggttttacgagcggattctgagcagtggcacgaattcatccaaatgggggaagaatatgctggtcaatgaaaaggttgttaatcaaggggttgggctagttccttgggctgaaattcctctggacgtaaaagagtctcttctggaccatcttcgtgtgtggtgcgataatatggaggtatacttcgattatgacaacatgcacctgggcctatgggttcctatggacgaagatcaagatgaagtcctagactggggcgatctgactgagatggggctggtgtttgcactaggctacgtgtgtctgctgcgtgagtcctatatcccggttggggttacaggtgtttcagcaggtatttgggtcggacgtaatgaagattattatgctccggagaatattaacagttggatccaggtgctgcgtcgcttcggtttccaagttgaagggttaactaaatgagtattcctaaaatggaacgtatctcctgggcggatatccccaaggaattgattgatgtagcagagaatctgctgcgagccgcgttgagggacgaggagctttgcttcatcatccagcatgacgtgtgtgttggtttgtccaaaggtagtttggcccaggattatgagatcctctttgattgggatgacctctcggatctggggctaatggttctggtaaacaacgttgtgttccaccctgctaactttgcggcattccgagagcctggggtgggtatttctcctgggttcttggtagctgatgagccttggacgtatgctccagaggttcttcgtgaaggcaaacaaaatgcctcttctaactcaattaatattatgggttggaatgcctagttgggagcttagaccaggggattttcctctggtcttttctatgtttaaacccagttacctaccacgtatttaaatattttacttgcaatctcgccacgatttttatataatatattcataggttgagagaaatgatgtgagttacaaaactgacataattcctctcattcacttccgagcatacagaacagtccggctgctacatgcttggttgggtttggcttattggaaaattgattccgaacggaattatagataattgatctagaatgcgggtaagagaggttggcatcgcgaggctctcagatatttgttcgttagtcatgtggagcaaatagcaccgcggtctgaaatgaccaagaagtgaagctgtaagtagcaacgtacctctgcgcaatagcgacgaataggggtcaaccacatggagcttagcggcgattacatgctgtgtgggagttgtgcgaagcggccagttctagcaatgaggaagtgaccacccctccatctataaggaaatttgttgagtcagtggacttttaagctgttctatccttgatagttcgagatcgctttattcttcaacataggagaaaacgtaatgttttctattctagaaggacacgcgggtttttcccgcgatcccgcttccggcaattggaaggaagtgaagacaactgattacctttttgcgaaggagttttctaacgagcatccagaaggtaagccagcctcaatgccctacaaatttaacgtagtggatacggttgaccccaaaaatcttaatgaagcgtatgagctgatggttcagctcactcaagatccacatctcgtagcagtacgaggtacatgcttagttgcagagaaggccgtgcgtcgtaaacgtactaacttcaaaatcgaccataagagcaatattattgctatggacgtcgatggaatctctgatactggaggctgcgacaggtttgacatcgtgggtatgggacgtcatgtcattaagttattaaatagcatcagcgaggacatgttcccgcttaacgcagggtttattgcccatgcgtcgtcctcggctggaattaagccagggattcgtatgcacatgctattagagagtaatattcctgttactcagggtcagttaaagtttctgtttacgtccctcaacgatagctctcggcagaagtatggttttgatattgccgacttagcttattattcatctgtacagctacactatttcgctgacccgattttccgggatcagtttaccgatccgtttaaagcggagggtaagccacgtctggttaaagttaacggtgctaggattgaactgcccagcactatgccagattacgaagccactcgtggggagtttaaagaagaattcttatccctgctcaatcagattaaaggaaagcgtgtagcctctgaaaaagtggaacaaaccattgcagagctggaagaagcagaggatggtgtttatctgcgtattattcctaaactgtaccacagagcgctggaggacggtgttgatttcgcctggcttgagaaagagattacctcagctctgtccgattatatcaacacgaaggataattcccgtagcctacaggattattttaataacgggcgtaagcaggcgttaaaagcgtttgtgaacaactctatgcgagatattcctgagtctaatgttaaaggcgttcctgtacataagttgacctctgatagtcccgatgggatgaactatttgaagatcaaccgtccaccgccggaaggtcatctaacgtttatcaaggcttctctaggcactggtaaaaccaccgcagtaacgaagtggttagaacgcgatcagctgaaaggtaacttcctcgcagttacgaacacacgtgccctggtttcatctaacgctaagaagtttgaggccggacagtatgataagtccgtagatatgttaaacttcaagcgcggtgccattgatcgtatgtctactactattcactcaatccacaagtttaaaaactttgttgggcagatagacgttatctttatcgatgagtgcgacgcagttatgaatgatctgttattcgctccagttgttaaacaacgtcgtgagtgtatctcagttcttcgtgaaattctgctatctgcaaaagtagttatcctgtctgacggggatatcagtgcagaaaccattgaggcatatggatctctcatagattttgacaagccggtctcttattataaacatcatcgtaagatgctctcggatgctcaggcgtatgagttcccggatgaatccagtatttgggttgctctccaaacgtctctagagatgggggagaaatctattctggtgtccgactgtgggccggatgagttaaacgagaaaggcttgacgttaagaaacaatacaggtgcgattgttaaagagattcactcaaactctacatctgatatagatattcgtcgtatcttagattatacaacgaatgagttaattgagcagcaaattgactgtctgttatgcagcccgtcagtaacgagcggtgttgacttcaactactttgataacgtatttgttatcactcgtacagctaaccaggcgccaaacatgcgcttccaggcaatcaggcgcgaccgaggagctaagaatatcttctatttcatcgataagtccaccagcggattctctgcgggttcggagcagtataacatcgatgagggttggctagaattagcccagcagctgtatgtaaaacgtcgtgagctagaatcccgtaactttatcagcacattacgatactatctgctggatcagggagcaactatcgatatcttcagtgaaagctggggtaagattgatagctcagccgcagagtatactgctgaacgagtttctgctattttgagcagtaccccggattggtgtgcaccccgtcatgcggacgcatacgaagccaagctaatgctggtcaagtacttccacctggactctatcaagagtatcacacaggaacatgcggagatgtggattagtaagaaacctcacaaacgggcggagttcttccacaaacttcaagatatattctggaaggatattaagaagtgttctaacgtgacgattagcccctttattgaagccctgaagaaacacaagaaggacttctttattaggacaggacagtctgccaaccctaaatatgcccgtatgtacttaacccaaatgggtattaataaggaaatggagacggagcagatcgtagactggtatcgaacttactgctctattgaggggatctctgtaccgtatgagtttatgacggacgaggagaaggcgctggccgatgaagcgcaaaacgaacttggagcacgtaatgagcaagcgtgatgcccgctgggagacaaggaagtttcccaaacgtgatacgaaagcacggaaagctaaagaaatagaattgtgtagggtaatacccattcgtttagcacaaatgcccaatatctatgattggctagaggctcagcgaaagacacgcctttctatacgcattaacatggaacttaacatggggtacaagagtctatctgaatttatgcacgttactttcgaccctacgttctatgaaaatcgcgattgcttagaagctaaatctgtattataatagtttcataaattcgagagaggataaagaacatggcaatccgcaaaaaacttcatgcgaatagcatcccggacgaaaagtttaaggaagcgattcagtggctagaagatggcaagaccaagaaaggcgcttgcgaaatcctcggagtggcatccaactccacgatggagcgtttgatcgaggaatggaaagataaccagcgtgtttctgctgaaatgcgtaaaaagaaacgtggcactaaaatcgaaggggctgagctggccaacgttatcgattcatatctgtccggtgatagttttgaggcaatcgccgagcgtttctaccgttccgcaaacatgatccgaatggttctgtctgctcacggtgctctgcttcgtgttaatggtgaggttgacccactctttccacctgcgattccagaagaatcgatgaaagaggtattcgaagtaggcgaacacgtttgggttccaggatatcagtgtatcggcgaagttaaaaaagctctggacaatccggtaggcgcatatcgtgtttacctgctatcagaagcccgtcagcagtatgttaactacatgtattgggatctggcgtctgttgagcatctggtagcacttggtgttgatatcaagtctctgggtttcaagtggggcaaagaagatgtagctgaactggttaataacgctgttaaagcagccctgaaattagagaagagaggtaaaggtgagtaaatatcaactcctgaacctattccagatttattccgaaggcgctacagctatccgggatctgcattatgcagttcccatggacgaagcggaagataatggctggcttaccaaatacgatcgtggtttgctgaagatgtatcgtttgtcccctaatggtttggtagctgttaaccaaatcctagaaaattctgtttgctttgcagctcagtaacttgttataatattctcatagtttgaaacaaaacttaaaaactctttttaacaataaataaggaagtaataaatatgtctactccaactcaatggtctcctgaactcgaagctgaactgacttccgcctacgtcgccaaaattgaactcttcccggaagatgagcgtcctggcgtttccatggagatcgtagctgagatcgctaaagagcacggtgtttccccgaacggccttcgtatgaagctgtccaaagctggcgtatacgtcaagaaagaagctggtaaatctgccgctaaaactggtggtgatgctcctaaagctggtggccgtacttctaagtctgatgctcaggctgaactgcgcgctgcatttaacgacgctggactggaagatggcttcctggacgaatcgatcgttgacaaactgaccggtaaagctgcctctcacctggccgaagctatccgtaaaatcactaaataagagggtattgcaatgaataaagcacaagtcgtagctatctgtgaaaaacacggtgagttttgcatgcaatacaccaaactgcgtaccaagggggtgacttacctctacggtacgactgagttcgatcctaagcaagataaatatctggctgagcgaatcgtccgtgaaggcctggaacccgctgacaaagatcatatcctggtctttagccgctctagcgataaattccgctatattccgattgcgaatattaagcgcatcaccagcctcaaccaagaacttgatcgagctactccagtaggtcgttaagacgcaatcagccccttcgggggctttttgtttatctgagaacaataaaaatgaatcaaaacatttgtcaggattacgaaggacatattgatgatcagtcccacgttatctttgaagatgaagggcgacagattcgtatgactgtctcggagtttagaggcaatttatactttggtttccgattatggttactggatattgaagataactggttccctactaaatcaggcttctcgttcccttacacgttagaaatgactagcacgctgttccgtgcctttactaaaatactaagcaattcagaggttcttcatgaagtttaccgtgaatctcaaaagacccaagccagtgacgactaagttgctggctttttctttaaaatctcaattgcttagtgttttaaaccttgatataatattctcatagtttgaaggagatctttatgaaagatcatgaaattgcccagctagttaataagctgaccgaagctgccaagacgtatgctcatactcaacaattaagagcacacatgtctagaatagttaaagaggcactaaagaatgcgaaagataacacttgatgcgtacttcagtcccccactacaggggcaggaacttgtcctcacgtggcatgagaaagaaaacggtaagccagtagttcatgtattgtccggcttccagatgttaggcatgtggtacgagaagaacgtattggtatgtgaactgtatagtccaaaatctaatcgtagggtaatgtccaccttccaggcggtatgcgaaaacttttactgggaaggaaagactcagatgctgttcgattactacgaggccaaataatgcaacacgttaaagaatttatcaagctgtgccaagacgcatactacaaaggcatgtcgattatctccgatgaagagtatgatgccttaatccgtcgtttcccgctagaggaagagattggccctaaaggtgatgtacctcacctattccgtatgttctccctgcagaaagtgtatccaggccgcggcgaagaagtacccttccggggcattgaaacgccgaagctcgatggctgtgctatttcacttctgtatatcgatggaaaattcgtttctgcgttaactcgtggtaacggtattctagggaacgatgtaactcataatgtgaagttactgaacatacctaagcagatctctcaaaagaccccggtgcagattactggtgaagtacacatcaccaaagaagttgagaatatgcgtaacttcgcctctggtgctattaacctgaaggattctggagagtttctctcccgtattgcggaaggtggcctgatgttcacggcatatagtattcagtgtgaaaccggcaaagttggcctgaccgctactttctgtggtgatatgcatatccttcagggtgatggttttgttacctgtctggatatctccagtcgagtagattggttccctacggacggcgttgtggttcgtatggacggaaacaatcagtttaacgcagcaggttggactaacaagttccctcgtggtgcgtacgccatcaaagaagacgatgaaggcgaggttactacgctagaacgggtagagtggcaagttggggcttccggtaaggttactcctgtcggatacttcaccccggtagtcatcgacgacgctgtcatctcaaaagctaccctgaataacgttggctatatcactgcccttgacctagaaatcggttgccagattcgtgtaattcgtagtggtggggttatccctcgcatcgtagaacgcgtttacgagtaacacttgattcaatagatacaccgtgatgattttttaaagtagttattgacattttcatcgccagggtgtatactattatcattcagttgagggaaagaaatatttggtgagagactgagctaaattctgaaaaatttcgattgcttagtcctgattttcttgctataatatttatataaattgatgaggaagaaaatcaatgaaaattgaaattccactgaattgcccctcttgtggttcgaaactggacttagttaacgatcagttgttctgccgtaacaagtctatgtgtccagctcaaagcagtaaattaatcgagaacttctgctcaaagatgaagttaaagggttttggcccacagacgattgctaaactggaaatcacgaaagtttcagaactctttttcctgactaaagaagatttagtcagagctgtaggtgataaagtcgccacgaaacttgagctagagttggaaactaagctgagacaagatgttgactttggttcggttcttggatctcttagtatccctcttatcggtgaagttgctgctaagaaattatcccagctttacaacgatttccaatctgtgaaagcggaaggtaaagctggagaaaacttagcttcgtggaagaatacaccagcaggacaggacgtaattaatctaccatggaaattcagtggggcgctggaaactcaagttaccccggcgactgaatccaacggagttgttctttgcattactggtaagctcaacgacttcaaaaatcgtgctgacgctaccaaatatctggaaagtcttgggtatacggtgaaaacttccgttactaaggctgtaaactacttaatctgcgaagatgaaaccaagatcggttcttcttcatacaaaaaagcacaatcgctgggcatcgaagtcttgacgattaaaattctactggagaataaataaaaatggctaaattaacctggaacgaagaaatcactgcatccctgaccgctaaagctaacgctctgaacgcgaccgttatctctcaggaagctgttgctaacatcgctgctgaactggctgctgaaactggtaaagaagttaccgcccgttcggttggttctaaactgcgtaaagaaggcttcgaagtgcagaaagcatccgacgtaaccaaatctccgtggactcctggtcaggaagatgaactggttgcattcctgaacgatcatccgggtcagtatacctacgctgaaatcgctgctgctgtagttggtggtgcttataccgctaaacaagtacagggtaaaatcctgagcctggaactgactgccgctgttaagccgaccgaaaaggccgctgctgtacgtagctttagcccggatcaggaagctgctttcattaacgccgttgccagtggcgcgtccgttgaagcaatcgctgctcagttcgaacgtaccgttaagcagatccgtggtaaagctctgagcctgctgcgtgaaggccgtatcgaagctatgccggttcaggaagtctctaatgctaaggcacgtgaagacgttctggaaggtctgaatatcgccgatatgaccgttgctgagatcgcagaagcaactggtaaatccgagcgtggtgttaagtctatgctgagccgccgtggtatctctgctaaggatcacgatggtgtcgctaagcgcgctaaacttgacgctaaatccgccaagtaattgatttgacctgaggggagaggaattttgttcctctcccctttttcgtttaagtagacgctaacgcggcgtagagagtatcttatgtataacgtccaagcagtagttttgaaaatgctcctagcctctgatcaaaagcaggtggccctagagacattctctagactgcgcaaagatcacttcaatgacgcatttaccgcgatctaccaagctgtccagaattattacaaaaagcataacggaatgccttcgttagatgctctgatgctagagtctaacagaaacgcaaggttgtctcaagcactaactgttttagcaaacactcagattccggacgttgacatatcgcatgcgattcatgtcctagagtcggaatacacacaggatctattcctgaatctgctagaaactgatgtgttgcaggatattaccatactggatcagggagaattacttgatcgagtagcggctctgcacatgaagctagaggaacgagtaacaacgactggtaaggtcttcaacgccgatactatgcgtgttttcaagagaaaagaagactcaatgttaaatcttatctctctcggcatctcaaacgaatttgatgctcaacttggcggaattgccagaaaagaaacactgctactcggtggatggcgtggtacaggtaaatcaatcatctgttctaacattcaagtagcccagtattacaacggggatatcgccccatatttctccatcgaaatgccagagaatgaggtctttagacgtaacctagccattatggctggtgtttcagctaaggctatgcgcaatgactccttacaaggtattgaactcaacaaacttgcgaagactcgtgcaaaaatgttcgaaggcggtctggaagtatataacgattttgtatcacgttatacgctcaacgagatgagtgacttccatgacatggagactatgctaatgcaggaaagacccctgcacactccgatgatcatcgtgtatgatccggaacttagtacagcaaccatcgatgttgaactaactaagctaacctccaagtatggggataaggtaacaatcgccctgctagactatatcaaccaggtacgtttgccggatacgaagacattagatatgtatgattggaagcagcagatggttgtgtcctctacgttcaagtctacgtgccaaaagcataacgttgctggtgtagctccttaccagattgaccaacagggtaacgcccgtatggcaagaggtattctcgattcctgtgatatggctgcaaacctaaatgccgctaaacagaacgaggggcatgacggtgcaatcaagtttgacttcgtaaaaactcgtaactctgagggtatgacatttatgccgaagatcaactggaactcattgcgtatggatcagacttctgatcttaaactagaggacattcgtcagatggaagcagagtttgttatcccacttgaaagcgataaaccgaaagacaaaccaaaaaggaaaaaggcttcggatgaggatactaatcccaccggagaatcctcaagagacttatgagtagaataaccgagcttttagatctcaaagggattgaatacagagatacgggtggggacatcctcatccgctgtctcaatcctgaccatgaggatgcacatccaagtttacgtgttgaccccgattcaggggtttttcactgcctaagctgcggatttggtcgtggtataccaagcatctttcattacttcaatgaagaacagtacaggacgtctcctagactcctgaaagttcgcagaatgattagtgacctccgaactgagggtcgcagtctagaaattccagaatcagccatgatattcgaccaggattttcgtggtatcaaagcagagactttcaaaaagtactttgcattccagcaaacagaggactgggaaggtcgtgtagtgtttcctattacggatgccgtagggagaaacttattcttcttaggccgtaatatggatagctctgcccctccgaaatatatgattagacccaagaaggtctccccaccaatcttccctgttcgctataataccccagccctaatcctagtcgaaggtatattcgacatgttgaatctagaagacaaaggctgccataacgtttcctgttgttttggtactcaccagttctcgctagataacattgctgataaattcatgccgttccaaatagcaggtacgactcacgtggtcatcatattggacaatgataagtccggtaacgaggcatctaagaaattagccaaattaatccgtgataagactagaattataccaattataggaaacttcttgcttccagagggcaaagaccctggagacctagatgctgaagaagtcgaccagctcatcagaaacgtagaaatcttgattgccgaacatgtcaagatttgatataataattgggtaagtttgagaagaaacactgacgttttacttgcttacctaataggagaaatcaatgaaaattgcagttgtagacaaatcaccgaataacgtccgctatcagaaacacttcgaactctttgaccatgaagttgaaaccttctttatggctagtgagaaagtaaccgggcgactgctcaagaaacatatcactatcggaacaccggagaacccgttcaatccggaagattttgattacgttattctggtaggtgcagacccgttcctgaagtttgcagctaagaagggcatttccgattactcaggtaaacgtgttgagcatgatgggtatgctaactggattgcaagtatcagtccggcccagctccactttaaaccggaaatgaagcctgtatttgaggctactgtagagagcatccacgccattctcaatggtcgtgaaaaacgttctaaagcaggtgattatcgccctattcagtgcccggatgaagccgaagcatacgtgaagatggtgtataccatgtgtcccggtatgattgcatacgactccgaaaccagtgcgctgtattgccgagatggttacatgctagggatctcaatctcccaccaagagtaccaaggcgtgtatattgatgcagacgtcatcacagaaaataccgtctattacttacagaagctattcgatagcccggaacatggcgttgtgtttcataacttgaagtttgatatgcacttctactgctaccacttaggtttgtcctttgataaggcagcagaagagaaacgcctccacgataccatgctgatgcactacgccctggatgaacgacgtggtacacacggtttgaaatctctggcgatgaagtatactgacatgggggactacgattttgaactcgaccagttcaaggagacgtattgcaagactcataagatcaagaaagaggatttctcgtatgatctcattccgtttgatatcatgtggccttacgcagcgaaagataccgatgcaacattgcgtctatccaacttcttcctgccaaaagtcgaagctaaccctcgactgaagtctctgtactacgatgtactgatgccgggatgcgtattcctacagcgcatggaagatcgtggtgtaccgatctccaaagatcgtctgaaagaggctcaagtccaattaatgaccgcgctacagcttgcaaaggctaagctgtatgagtatccagaagttcgtaagctagaggaagatcaaggctcagtatttaacgcagcctctgttgttcagctccgtaagctcctgttcgattatgttggcttaaccccaactggcatcatgacggatactggtgcagattccacgggtgcagatgctctgaaagagctttcggaccagcatccgatagctaagactctgctagagattcgtaagatctccaagctgctctcgacgtatatcgagaagatgctgatcagtatcgatgctgacggctgcattcgtactggattccatatccacatgactacatccggtcgtctgagttcgtctggtaagctgaacctccagcagttacctcgtgatgagtctgttattaagggttgtattgttgcccctatcggttatcgcattatcgcatgggacttaacaactgctgagatctactatgccgctgtactgtctggcgacattaacatgcagcaagtgtttatcaacatgcagaacgacccggaaaactactcggacttccacggttcaattgcacacatggtatttgccctgccgtgtaaaccgactgaagttaaaaaactgtatcctgcactgcgtcaggctgcaaaagcgatttcgttcggtattctttatggttctggcccggctaaagtagcagcgtcagtaaacgaagctctcctagaagagcacatgaagactggtaaaccgtacaccgaatgtaccactggtgatgcgaaagagtacatcgaaacctactttggccgattccctcagcttaagaaatggatcgataaatcccactcccaaatccagactaatggcttcatttacagccactttggccgtaagcgtcgtctgcacaacattaactccgaagaccgtggtgtacagggtgaagaactgcgttctggtttcaacgccatcattcaatctgcatcttctgatagtctcctgctaggtgctatcgataccgataatgagattcgctctcttggtctgcaggacgaaatgaagattatcatgctggttcacgactccgtggttgccattgttcgtgaggatttagttgatcagtacaacgagatgctaatccgcaacattcaggtagaccgtggtattagtattcctggctgtcctattggtatcgactctgactcagaagctggcggttctcgtgattactcctgtggtaagatcaagaaacagcgtccttctgttgcttgcattgaggacaaggagtttgaggagaaagtacgtagtattatcggtatggaggacttcgattacgctgctattgcggctaacgatgaaaaccaccctgatcacgataagtacgccaatattaagttcttgccggaaatcagcaaagatattgtcaacgttcgcagggttcttggtgcttaactttagcttaccagtatatgctttaagggcttatgatgtactcttccaagagggggagtacattgttatccagacgagatttacaaggtatgtgctggacaatccgagccttcctgggacattctctcagcgaaggctttttctttatggtgaacgggaaaaattaccttacaagctctatcccttaaagaagcagttcaagtacttatctcaaataataaattctggactaaagcatttcatcgactccacaggtaagatagtaacatggaaaccgacaacttattacaacattatcacagaacgtgttagaggatcaactagaatcttcaacggaaagtaccagtgttatgttaagaacgttccatatcctttcttacttagtgaacctgccaactatatttcgtacgcgttggttcgcggttcacccgttatttttgatacgcacgaagaggagccagaaactcctagacttagagttaagatatgaagatagttatatctaataaaatctattgtaaacccagcaacgaactgtgggaatacttattaaaacacacttcataccagatctttaaacctggggcgaagtatcctctaatgttccagaactcaggatcggtaggtaaagaaatcaagtggttccctgtaaccagattagatctcctagaatctttcgggcaaaaagtgacagagatcgtggataaacgtactctggttcctgtggatattccaaagccatcgtttaccctgagaccgggggatcagctccctatatatgaagactgtaacgatacgtgcattattaatggtaagccggggttcggtaaaacaatccttgctcttgctatcgcccataaacttgggcaaaaaacgttagttatatgtaccaacactaccattcgagctatgtgggagaaggaggtacgcaagttcttcgggattgagccaggagttattgggtctggcaaatttaatatcgattcgccgatcgttattagtaatatacagaccgttaacaaacacggtgctgctctggcaaaagaattcggcaccgttattgttgacgaagtgcatcactgtgttgccaccacgttcaccaagtttctagagcagtcctcagcacgatataaaatcgggctatccggtacgttaaaacgtaaggatgggctacaggttatgtttaaggattattttggaacgaaagtgtatagtcctccggtaaataacactctgccgcctactatccataggtttgcactaaaaacgcaggtttctggaaatatgaatgtgccgtgggcgataagagctaacgatgtatattcgcagccagagtactttcaacaggttgttgatttgtgcgagttatattcgatggcaggtcataaagtcctatttgtgtccgatcgtatagatctgattgaaagagttacgaatgctttggaactcaggggtgtgaagacctacacgatcaccggagtaacttcgctcgatgatagggagcaggtacagattgacgtgaccaatgacggtccgtgtgtattagcggcttcccaaagcatcttctcggagggtgtatcattaaatgctttatcgtgtttagtgttaggctctttaataaataacgaatctctaatagaacagttagcaggtcgtgtccaacgtatggcagatgataagttggacccaatcctcgtggatctaaagctaggaggtgtaggattcaagcaagcagcaggtagagaagcagtatatcgtctcaatgggtgggaagttcttgactttaacgagaagaatatggtaaacttagataaaattctgtttgctaagaaccccaaagtttgatataatatttatattgaattgagagacagatttacaaagaagagttaagcaaatagttaaaaatttcagttgctgagtcctcaaaaatacgatataatatctgtataaattaatgggaacagcaactgaatcttcggaaagtccgaagcagaaaaataaaaaacttagttgctaaattctctcaaaatggtgtataataatcatgttgttttatgattacgagaaaatttacatattagcgcgaggtaactcatcgctgattgtacagattatcagacgaatggttgaagatcccgaagctcatgtgatgttaacgggtagatcatttatcttgaacgaagatacaatcgtttataacaaacgaaagctgtcagaccgacagttggctgagtatctaggacttttgagttttagaaactatgccgaatatagcttctcgaaggattcatcactggatatgcaatatattccaccgtgggttcctagagcagttatcgagcaccacccactaatcgcaatcaacaagtcaaaattgacatttatcgaggaaaaataaatatggctactaaatcttggggttctactactggcggttctaacggcgataaactggactacatgaagttcaacaacggtaagaacgttgtgcgtatcgtttccggcgttctcccgcgttatgtgtactggattcagaacaaagaaggtaaaccggctccgttcgagtgcctgcgtttcgaccgtgaaaaagagcgtttcatccgtggagcatccgatccggttcacgacatgggcttcaaagatccggagaagaaagatggtaaggctcagcctctgcgtcctaagaaaaactacctggccgttgttatcgaccgtactgataacaaactgaagctgatggaagttaaggcaaccatcctgaccggtatccactccatcatggcccagctgaatctggaagatccgggtgaaatcgatatcactatctccaaatccggtactggcttcgatactaagtacgacgtacagcagatcgcagcgatgcagttccagatggctaaaaatcagccgggttctaaagaggccgccctgcatgaagccgacgttgctctgattggcgaggctctgtacaacgaagcggacgaattcgaaggcttcgaaaaggtgcctaaactggatgttacctacccggtcccgtcctatgatgagcagaagaaagcaatccaggcatggctggaaggtaagaaagatgaggagggcgacgaatctaaaggtaatgaaggttccgcgaactccggtaacatcgatcacgaagcagcttctgacctcgattaatccaaacaaggggagcttcggctcccttttattttgactatgaaaaacaagttatttgaaatgtattctacttgtccagaggatttcgaacgatttgtagcagctttacgagagacctataaatatgatcccaccactggtgttatgtctaggctaaagtcctccggaggcgctagagctggctcaactgttgggtctgataatggtaaaggctatttacgctgctcgttccaacgatcgttatacttagtgcacatattgatatacgcactagtaacaggagaaatggtcgagactatagaccatcgcgacttagataagaagaataatgcttgggataacctgaggcccaccaataagtcaggtaacgaaaagaatactacccaccgtgtaacgtctaccacaggtgttaaaaatgtgtattggattgctgaacgaaataaattcagagtccaatttaaggtagaaggtaaaacaaaaaccttcggttactacaccacgttggaagaggccgcgcaagttgctaagtccaagagattagaacttcatggagagtttgctagatcatgaaaatccttttttcagcagatactcacatcaagctaggacagaagaatgtacctagtgcctggcaagagaatcgcttccttatgctaggagaacgtttagataatatcttcggggcaaccggttgtgatcttcacattatcggtggcgacctaatggacgttgcagatccttcgtctgaagaagttgagctaatgtttgccttcctagcaaaattaggtcatccaggtattatctacacaggtaatcacgaacttaaaaccaagactatttcctgcctggatcactatgccgcagccatccacgatgctactaacggactttggaaagtcgtcaaagactaccgatctccagagttcgatatcatcccttacagcagccttcacaaagctagttggaagcccagagtttcagacatttgcttcacgcatgtcagaggtgcaatcccgcctcacgtcgtaccagaaatcgaccttgaaagattcgtcgaacatgggtactccaaagtatttgcaggcgatctacacagctacaagaacagccaaaagatcggggacgttgacctgctctaccccggatctccgcttacaacttcgtttcacagagaaaggacgaaaggaactaacggagtttttatcatcgatacggtcttgccaagagaccatgagcactacctttcgtgggttgaactgggagatcttccacagctcatacgaaaaactattgaagtcggcgagccaatggaagccgatgcgtatgacagagttatatacgaagtcaccggcgacgtatcgcaactcaaaacgttaaagaacagcgaactgttagataagaagatcaataaccgtgtcaccaaagatgctaagttagatcttgacgatatgtcactgctacaggagctggatacttattttacaaacgtgcagaaactagacgaagcgtctagaacccgcatattaaagagagcagctgagtatgtcgatagtaattaataaattgacaatcagccattttatgtcgtatgctgagaacgtggtgatcgagtttgataatcaccgcgtaactcagttaatcggacgtaatgggctgggtaaatcaacaattggtacagctctagaggaacttctttataataagaactcacgcggtatcaagaaggacgacctgtttaactggtatactggctctaaggcctatacgctagaaggtcagttcactaaagatggtgacgtatataacgtcaagaaagttgtgaggtcaaccgccaaagtaaccctcactaaaaatggtgaagatatcagtggccatactgcaacccaaacgtataagctgatagaagaggtactcgcctgtgattttacgacatttactaagctcgtatatcagtcagttggatccagtctcgacttcctcaagacaacggatgctcagcgcaaggctttcctcgttaacctgttcgatcaggaacaatataaggaagtttctgaacgtgttaaagcgggacgtaaagccgtctcggcaaaactgtccggattggaaggtagcctgcgaactgcccaatctatactttcctcaaaagcctcgcttggcacacctcaatcagagatcccaatccctgttttcgatgaagagccactagtcgaagaattaaccgaagcaaaagtcaaggtagcactggctcagaaacaaaaagccagtattgcaaaacgtagctctttggacatggccgtacaagccgccgaaaaaacttttgcaccattcgaaaatttacctgcgcccacctcgaaatctgaggaactcctgagtgttacacgttacctaacggtcgtggcaactagagcggatgatctaaagaaacgttactatgatttcaaaaatgcagcaggtaaaactcagtgttttgcgtgcggaactcacttagacacctccgccgctcaagaggctatgagacgaactaaggaggagtatgatccgctctataaagaacgtcaaaagttggaagcagaagttgaagaacttaggaaggaagatagggcgtttaaggactatatctctaagtttaacgctctggaacaggctcgcaaaaacctcaaggaatttgatgaggtcaatggaacgcaggatgaaatcgtagatgctagtggattagctgaacgtatcaaagctattgagtctagcattcgtcaaggcagatcctcggtagaacttgcaagaacccataacgaatcagttgtacgtgaaaatgcgaagtatgaagctaaacgtgaacagattcaaaaggccgagcgggagtttgataagattcaagccgaattgtccttagttgcagaagaagtagcggatctggatgtcttaatcaccgggctgaaagatctggtagggtataagctagagcacagcgtcaaggtatttgaggagatgatcaaccactatctctctattatgaccagcggtaaatttgctctaggttttgagttggacgagacgaagctacaggttgtcatctacaacgatggtaacagaacttctatggtcaactgctcaacaggtcagcagagccgcatcaatatctccacgctattagcaattcgaatgttactttcaacaattagtaaggttaatatcaatctgctcttcctcgatgaagttgtaagttatattgacccagatggaattaataccctcgtagaacttctacaggaagaagatcagctgaactcaatcatcgtatctcacgggcatacgcatccgtacgcacataagattgaggttaaacaagatgaagctggcttatcaattttggaggcctaatggccgtagatagtcgcgagaaaggaaaacgagcggaatatcaaatccgtgatatgctgcgtaagtatacctccttggactgggaacgtgttcctggttcaggagcttttggacagtcccattccctgaagggtgatgtgtatttaccgcctagtgtgggtaaaatgagccaatactgttttgagatcaaacactacgcagacgagaaatttaatagcaatatcctaaacgttggagaatcccaactagaaaaatggtgggcccaagccgcgcgtgaaggtgagcaaatgaacatgaaaccagccttgatctttaagaaagatcggggtcaatggcttatcgctctggatagtagcgaccctatgattgataacctcatgagtagagcccatttcatagtgaataaacgtggaatggaaattgttatcggtctttttgagccgtggttaaacgcatgtgaaattggagatttagttaaatgagtaaatcctggggaacaatgaagcgtgaggcagaacaacgcctcgcctcacgccgtaatcttatgattgttgacggtactaacttgggcttccgctttaagaaagatagtggtaagcctattgcagcgtcttttgcaaacaccatcaactctttggcaaactcctatgacgcgaagcatactatcgttctaggagataaggggaagagtatcttccgtaccaatattttcccggagtataaggggaaccgtgatgcaaaatacgcagatcgctccgaagcagaagtagaggcggatcgtcaattctttgaatacttagacgatgcgtttgatcttattgcaagccaattccctactttccgaatccgcggagtagaagcagatgacatggcggctttcattattcagctgataggccatcactatgatcatatctggctaatctctacagacggtgactgggataccctgttagctccgaatatctcgcgcttctcattcactactcgtaaagaataccacgagaaagatatgttcgacaaccataacgtagatacggtagatcagtttatctcattaaaagccattatgggcgatatgggcgataacattcgtggtgtggaaggcatcggtgaaaagcgtggctataatctaatccgggagcatggcagtgttctggatattatcgatgcgttgccattgccaggaactcaaaaattcgttcaggcactgaataaatcaggcgaactcatggagcgtaacctaactctagtagatctcccaagtttctgtggagaagcagttgccgcagcaggacaggatatctacgaccaatttgttaaagacattatggctattgccacaggagaagtataatgcgtattaaattatctcaccccgattgtaaacctcacgttggaagttcggaagccgccggtatggatctacgggcctacttcggagatcgtgcttccgacctattgcgtgccatacccccaggggagtcattgatgattgataccggagttgcggttgagattcccgaaggttgggtaggaattgtggttccgagaagttctctaggaaaacgtcggctaatgattgctaatacagtgggggtgattgactcggattatcgaggaactatcaagatgaatctgttgaatatgagcaatgagacacagccaattgataatttcgagcgtctgtgtcagttggtggtcgtacctcattataaccccaatgacattgaaattgtcgatagcctaacagatactgatcgtggggagggtggatttggaagttcgggaagcaaataattttactgatcctaatatggtaggtattaatatgccaacttatcaggttaaaactactgaaccagaaatgttagtgctaaaaacagacagagagggtaatgttactttctgggatcctgaaggttttgtagaactttgtactaatactgataatgaacatttaaaaatactattaattatctataatcttggtattatagagggctgtagaagcatataatagaaaaccccagtggacaaaatccactggggtttcttttttgtcaaactttactagccagtaaattttaactacttgggttaggcctgctgtttgcttttcaaaatctctattagacgattggttgagtgttctgcatgtaatattgccattgaatgcttagctagagcatgtttttcatacaaaaaatgttatgaaaaaaggggagtgggcagtttggcctctttgattattcacctttcagttttctaatctcctctttcagttcgtcaacttgagccgaaagtgccttgattgcgcaaagtgcatccattaacagcgggttagtgtcaagtacgagtcgcttattctcgactacgttcccgtcctcgtcctgataggatgcttcgctttctttgacatagcacgggtcaatctctcgcacctgctgtgcaataacgcctcgacgctctcgcttatgatcatcatccttataggtgaacttgaccagattcattgctttgatgttttcgagtgattgcaatccatcgtaatcaacaacattgtctttatagttaatgtcagaaagaccagcaaaaacaacgttgccataagaagtgcttgcaatattaccgtctgatttaaattgccaatactgcgtagttccagaggtaccccatttgctgagctcaataatggcgcgatgttcataccccctatgttcctcaagccacatagagcaacgagcagcgttaccaattgtgttaaaccttgagatgaatgatggggctttaagtatcgcgccatttcctccagtcggatcttcaagggggcaagcaacgaaggcgtcattatggcaagccctaattagccctcgcgctgtgaagtcattcatagcgcgcacacttcgacaatcaagcgttagctgatccactgcgtcgttgataatccttgccgtgaaatccgcgctcgatttgttaaagtgaaaatcgacatacggcgattgactgtaaagctcaatcccgccgtcagtagttgtaatgtttccgctattagcagtaacccccttgcccacaacttcgccatcaacaaccatttgaccatttccggcaatcgtcacttgaccacttgcggatccatcgccatttggccggaagtacatcatttgcccagccttagagctaatgattggggaaccggaaggattgcaacgaattgccgcgccttgaccaaatgccattttggtatctccaccacttgcagccgtgcaagagacctcgatcccattgtccgatgccgcagcgccagctggtcgtaattgaacctgtctatcagtgccaccggaggcagacagaatcaagctaccctcaccaccttcgcgaaccattgcaccgcgaccaattactatccctttgtcacttcctggtacttttgatgctgcgccgccaccaacgccaaggtttccatttaacgagctagcaccactgatagcaagctcactaccagaaaggctaccagatgcacttaacgtcttaacactaacgtcttgattcatgccacttacaaccgactcgcgccactctgaccaagctccaccattgctataacgtgtgaattcacgatttaaatcagagctaaaaatgcgctgacggttagtgaaatcagtgtcgctcactttacgaagtgactcgacgtaaagaatgaagtttccagctataccacttggtttgttagtaatattcctaccacctccgtatcctgggcaccgataaatgcgtaccgtcccaggagtactcaggttaatcgttaggctgttaagatcaagtgtctgcccatctatgttctcagcctcccaagcgccagcaaatccattggtaaaattcatgaacccagcaacagagaaaccagcatccatcattttacgcgttacaaccttgctgttttgcgcttggtttgaattttctccataagcgagatcgccctcaatatcaatgcctaaaagctttgcactcatgttgttaagtttaaacccaatcgacagatcagaatcagcatcgcgtgttaacatgattggcgtgtgttgcttgccactaactcttagacttgttgccccagtgtctgtgtcgtcattagagaaatcagcggtacgagaagagatcttgtaactgatctttgcgtctagcgcttcgattcgtccatcatggcgcacaataaaatctccaccagttgtgccgccagtggtccttgcgcgaatgcgtacctcacccagcgattcattgtttggcggcgaccaaatcaccccgcgctcgcttccatctgcattcatgaaccataaattagcgcttccgcttgcagattttagcctgatagtcggcgtcccttttgcgatatcaaggtcgcccgtcatggtatcgccaaccttcttaacttgagcgtcgttggttacattgcttaggccaacatctgattttgatggcttgttggctgtgccaaaaagggtatttacatttgcgtttccggcgtttaggcttgcatcattggcggcgagtaccacaaccttaccactgttatagtcaatgttaatcgctgaaatagtgtctccacagcgggaagacataccagagccgtgagacataatgcttgagctagttccagacttctggcttgcccgccaaaaatgcccacctttctctcttatgcgctgcaataagtcttcgttgctggtaatgttatcatatgaaataccattacccccaagaccgaaagcacctacctgcatcacgttatcatttgacgtaccaacatctttataagctgccgaacctagccccaaagcctcttttgacggtttgttaagctcatcatacacgcggatagccttgctttccacccagtcggctggcatgtcgttttggctaacatatccgctaggaatatagaggtcaacccaacctgcttttgccagaatagccaccttcacgttattaatgaaagcccgctggaaggcccaaatctcaaagaaaccatcacccttaacaatcccgtaccgcaattggttatcttccgcaaggctaggatcaccaagacggcgaatccgcataaactggcgaacgtttgaagcgttaataacggttgttccaaggctacacgctgacgcatcaagaaagtctattgagccttgacgcgctccatagttacctccgttagtgatcattagtgtaatgtggcattcagacgaattcggatcagtgagctttgcgattttcacatacttagcgcctgatgatgtaccaacgggccagtcgtattgagtcagcgggctggcaataagagaggctttatcggcatacttcttagcatttatctcgctagtctttgcattagtctcgctagtctttgcattcgtctcgctagtctttgcattcgtttcggatgttgcagcagcgtttttgctgctattagcgttcgtctcgctagtctttgcattcgtctcgctagtctttgcattcgtctcgctagtctttgctgccgccgcactcgctgctgccgctaccttactactgtctgcgctagtagcacttgttgccgccgcgttcttgctggctgccgccgcgttttctgacgccttggctgctgtctcacttgccgctgccgcgttcttacttgccaatgccgccgtctcgcttgctttcgctgcatcttggctggtttttgctgcgcttttgcttgctgccgcctccgtctcactagcttttgcgttagtctctgaggtcttagccgccgtctcactagcttttgcgttagtctccgaagtcttagcagctacttctgatgcttttgcgttagtctccgaagtcttagcagctacttctgaagccttagagtttgtctctgaagtcttagcagctacttctgaagccttagagtttgtctctgaagtcttagatttagtctccgaagtcttagcagctgtctcactagcttttgcattagtctccgaagtcttagcagctgtctcactagcttttgcattagtctccgaagtcttagaattagtctccgaagtcttagcagctacttctgatgcttttgcattagtctccgaagtcttagcagctacttctgatgcttttgcattagtctccgaagttttagcagctttagcactattagcagaagcagtagcagaagaggcagcttgagttgcagattgttgagaagctgccgcagagatagcggccccattctcggaagctttggcattaatctctgactgcttagctgcggcagcagaagctgcggatgcttccacagccgaagttaactctcctgctgtaatagaactaatagaattagccagaactaccgtatacttagggtacttactagcagtagttatggtatcatctatgtttagaagctgctgtacaataattttagttttgattgccattattgagttactccatcactgatatagactttaccttccatgatacggaatgaaccgacccctgagccagtaccatcacgagtcattagaatgtcatagtaaccagcaaaacgttgtcttgggttatatttatcacgttctttggatgctttattaccaatattggtaacatcggaaattgaaagactgatagtagccgtcccatgagtagcgtcgattacactagttttaaaggttgctaaagtctcagcatcctcatcaagatttgccttgatagttccacggagtgaatagcctgttaaattcacgagggactcagttggaggataaacactatcatcaacatccataaactgcatgataagaccatacggtactttctcatcaataacaatatcaattactctattttctgtactcattattttaccttatatggatatacccagtagctaggtctatcttcattctgtaagaggcttccggattgtttgataacgctgcatttctatcatagataacgttaacacctatctgagataagaaggcatcattcgccacaatcttactagcggttaccgtgccgttaactatcatattgccgtgtaaaaccattgcagggtcagcccaactggagccattccattgacgagtaaatgcagattgtggagcactactattaaactcagtcaacacgtcatatttaactggaggactaccaaaattattctgaaagaaggcattagcctggctgtcgttccaacccccaagaccagaaatacctaaagagtacatcccaggaccacgttgtccatcgtgtccaattgtaccttcagtaccactccactgaactacatctgaccagctagtacctacaagtaatttattagttactggatcaagtgtacctgtagtcacatagatattttgagtcatatccgtacgattaggtggggttttcgaccaaccagggggtggataatcttgctctagtggttttgcaggaagtgagtatgctaatttataaacgaatactgtttgcttaccttgcatacctgtaccaagatctacatcgccatttggtgtgccaattacaactttatcagagattctcaatgtatcaccatcgtaacgtatatactgtgtagcgttaccgatgtctaattttggtttagcattggtattatccatacccatccaaataccagaatttgcatctccccaggttttaccttgtgtatatattgccggattatcctgaccagttaggttagtcatgacaaaattagcagcattaatagttttagtgattacgctaccatcaacgttaacagtttttttaatgggatcaaaagatattggtgcttttccttcttcatctagaagacctatattaacagcaccagtggcggcatctagtaggaaggtttgtttccaggttgtgccctctttgatctttcccttaatgtatgcatagttaacttctatacccgtttcgttaacaaaactattgtctaatggtgtactctcatttaatataaatgtctgtactgcggaatcagtaacatcttgagcacccggtccccaagcaatagatgacaccttaaatttatgctctactttccaggggaatgatataattgttgctgattgagcagcaccaacgttaattttttgtgctttagtccatccagttcttgcaaactctgctgaatctatataggatagaacgaattcacgaacgttagcacctgcacccttattccaatcccattgtacacgtaaatcatagcgttctttaccatcggctatacgcgcggctttaaatacaatattaactggagctgtaggcgatacaaagttatatttaacttcaaaaacagtagggtactcatagtagccggatgaatcaatagttaccccatctggtagagatacttgtccagaaattcttaccttataggacccaactggcacaccaccaaacataatagttggcattaatgccccaacatagtatttaacccacggattattagcattagaattattttttaattctatagtacaataatcagcttctcccgtagtatttagataaactattggtgccccaacacctacgtctaccggctctgattcacatctagcactcgtaattctaggtgctgacttcattttaaaagtttgtttgtcagacagattaatacctatctgagcattaagtagttcagagtctattatagaatcataaaatgcaccctgaatctcatacgttgctgtaggttttagattattaatagttacagagaaagtatcaactccagtaaaatctctacgagtaatgttgctaccttctttaagccaaaaagatctgcctataacatcgtaatcagagtagatagaatgctggatatacgccaacgtatatccagttacgacgctatttaggaccattttagctggtgcattatttgaaatcatttagatatacgcccatgcaaccgacttctctccccttggtccctctgcctgtattcttggctgaagtgctctataaatccccaaagtattcgagttgttggccttatagtcgagcttattgtaactcaacaggtagctgtagttatataaactggtgatcttcgcggatctaagcagtttattagtgttatcccttatttcaagcgtgtagaaaatccctgaaatcagcccctcttcttgcagcttatcccatcctaactctaggtcaggtccgacccattccgcaggatcaggagataggttaagcacccggaagttttccaccacactaaggttcttagctgaattcaaatctacagaaattgttactggagagctacgacgaccattaatatcaacagcgcggatttcgaaaatagtcagtccagcaggctcacccactatatcttggaacatcctagcattaggagtgaaagcagtctgctgcacaatataaggatccacgcggtctgatttacgtatcgagtaataaactacgttaggcgttaaactaggtagccatgaaagctctccatttttaccaacatcaccgacccttccaccaggtgtgggggtatacttaaagtctcttggtggcaggacattattggatatttcaggaacggcctcgccactgttatccacctgcgttgagttaataaatacatcctcaccatactcctgaagagttacgtttatcttaccatctcttgtgttctccacctcgtctactaggaagaacttcttattccagccataacgatcgtaggtgaatactacaggatcgttaggttctatgccaaggaatttgtaaggtaaagagaaactcagagagcgtgagtaacgagacttcttaagctctctatctgccaagcttctggcagtgtagtagttggttatgttagcaaaagaaagttgaagttttttgtcaactccacgatcttcattcttaaacttagagttatagaacgttatagagttggttttccagttcaaggtaggatcaatcagagacgcctgaactgagttgtacttattacggcctgtagtatctgatagatccaggtccccataagtatctaggaaattaagttctagcggagtttttgaatctttctctacggtgatgcggaagatacctgataggttattcaacgccccctggaaggattctaatagctcctgcacgtttttgaacacagagttggagttatccaggattgtgttcatttgcattatttgtctgttttcggctgtccagctctcccatccaacgtatctccagaaaggttgccaactagtttggtaagaggtgtctataatatttaatagatcggcctcttttctccagtcaccaataaccattctgtctatcgggatacttgcaccaaaggtagtggaggttaggtagtcaaatgtttgccatacaccattctggctggttttatccattttaacagaaccgtctgcctggtacacttttaccttgcggccgcttaattctgcggatacttctggaatatcagttctattctctgtaatagtgtaccttataacagcgtatgcggtgtctagtagcttgtacctagaatcccagtactctggcccattaccgttctccccttgaaggaagaaattgttagcagcagcgatatcccttagtaccgtagctaccgtctggtctggcttgccatggaatgtccagattcgtatatccccgttaccgtcattgtacttgtattcttgaccatgcgtggatagggatgttgatgggagtcctgtggaaattcttgccatagtatctcccgacacccttttttgtccaaagcatgtacgagaggtactgtcagtttgatcagtacagatcataggggcgtccccaaactggaagtctaggaatccttcaatctcaccctcacagaacgcgtaaaccacgtacacaacgtttgggttgtttctctctgtatccgcgaaaaccgggataccaggaactttttgagtaccatatactacaggaataaacttggctgcaaggttgaagtccaggtctacttctttagtgacagtctcataatactttttaagactgtagctcttggagagaccaaataatttcttcttagattctagcttgtatcgttcttcttttacttgatatttagctaggaagttaacgctcttgttggcgtggaagaatccatagtcttcttggtattccggtcgtttggcaccgtgggaaggtagtaattctccgtttacaatctcaaaccctcggtgggaggcatcatctgtgaagcgtccagcaacccgctcaaaatcatagaattcgttagaacagttccaagttataacagaagtgccaacttcagatactgtattagtttctttgataccaccgcctacaatcttacctctaaagaagagtaacgggccgttagtatctgggtccaccggaaggatttccccattgtcgtcgatgatcgcctgatatatagaaatagaacgatctaaaaatgatacaccactttgcacgagcttaatgacttcgttggcatccgtaccagtaacactgaagctcaaactgccgacggttaacgtacggttttgtttgtgactgctaattgttttaattttccctgattggaagagtataccaccatagttgatatctctcatatagtccgtcatataagcataaacagcgttattacccgtggaccccgggagttcgatagagacaagatacgctaatcgtatcttgtcattgttggcaaggtaggctttcgcagaaggaaggatctgtctcatagactttctctcagaactaggttaaccccgtcatacacaccatcaactgtgatctcttcactgaatgaatctccgttcattaatttagtttggaagagaatcccattgaaacgtggtctctcggagccgttggtagtgagcaacagatcagggtatagattaagtgtccatactcctgctacgtttttaaaagatgtaatcttatacacctttggatgtgtggttaactggaataaatcaccaggcttaggctctccagatagggagctcgtattggtaataaccagtgtggagcctttttgtccagcggcaatgcgacagttgttcgcatcccctctcactcggtaagactcatagtgtgggagtataacgtcgaggtagcctcgggtacgcttatactctaggattgctgacgaaagtacagcatactcatcgggaaacatcacaggataactaatgttaagaccccagtactgagtggctgttttaacttcgttaaccttgccgtttggaagctcgtctctgatcatcggatcgttatcgatcagtgtagctttatcaaacccaaggccgttatactgaggatgtgtaaagggatctggtaatctcatgttttgttttctcctctcaatgttaatattatagtcatatcaagaaaaattttcaagataattttataaattccaaaaagaagggaggacaattacgtcctccctttagtttagttaattcaggttctttaagctcagcccttgttcattcaaggctaactctacagctgcctggaatgccgcagggttttccaatgcgtactccataaagctcttagcgtccattgcctggatattcagattaaccggtcttctagcaccgtcagaagaagtttcagaagctactttatccgctggagttaccttggtaggcaccataggagttgcaacttccgttccatgttcacccatcttataggagacacctgggtaggtattaccaccttctgcacgagggataaatccgttagcactacctatgcctttatcaccgcgaacgtaagatagttcgcctgcgtttgcgcccatgctaacatctacgtttttctggcgctcacctaaggttaggtaagaggcggtttcaccaccagatcctgctatatcggtcattccggtagcactagatgcctgagctagagataaagcacctgcaagcccagccgcgatcatcagaggaatagagaacggatacggaacagctgttgctgcctgcattaccgctactgctgtctggataatgatttgcttcttagcagattcctgctgaagtttaatcttctccgcttccatctttttgatcttgttcttagactgctcagatttaccgtcacgtttctgctctgccgcgatagctgcatcaattgccgaaatctgctggttagtaccatagctgatcatctgactaactgtctgcatacctgctgcaatcatggacgtagtgtccagagacccttgagagaactggatcatagcgttagctaagttccccatactttgagctgtagcagtggcctctgagtttagctgagagagcttactgatagctgtatcgtatgacgccatctggttttccatatcggcgaatttcttatcttccccttccagaccagtagtaggcgtatagtctgcgcccaacgactgtcctacacgatccatcatctgtgcagtacgctgagctttgagagccgccatttgcgcagtagtgttggcaatttccttgctccaacgcgcctgttcatcagcgttacctttcgtgaattccttcatctcctggtagaacgctagctgctcctgcattttctgcgactctcccattagaggcttcatgctttgattgcgttcgaattcctctttacgcatctcagcagttttggcgttacggtcaagctgctctttccagatttccctttcaatcgaggcaatgttacgtctagactgttcggcttccttctccttatctgcctgagtcttcagtaaggctaacctatctttctctacttgtagatttaatttaaggttcgccacgttatactgagaatctgtcatagtgcgattatttaagagtgcgatttctcgatctatgcctactatcttatccttatagaatttctccttcttagtcgcttccatgccctggttcttcactttgagctcttccgtctctaacagggtcaactctttttggatcgccttgttgtccttgttcgtcgccagcacagctttcaatgcctcttttttcgcgctaagttgctgcatttctagggctctacccgcttcttccgccttatccttattacgggtggcagcgtagacctcagctatacgcttctcaacatctagcttagacttagcctcatcatttactatcttctgatagttagacatggctttatacgcagtgttcatctcggttacggtggagtagcccagattaaggtccttagtcatttgattggctttttctgtagatccaccagccaatgactcaaccgccttaagtgcatcacccagtgctgcagtagctctagacgcagtattagagtcctgtgcaaagttctggatatcgttgctcagatctccggaagttttctttatattattgaactccttccgtagagcaactgccccgtctaacgctgcgttatcaaatgtgtataatccattacttgcttcaacgttctgtgcaatattgagttttcctgccagttctgggttttccttttgagccttagatagagcggagtccctagcgtctttccatttttgaatagctcccgcagaatctgctaactcctgctgtaacatatacgcctgtctacgcatatctgcagtctgttgtgtaaattctttgttagctttagaggctcctaaggtaagcaggttaccgaatccactatagttggcagctgtggctagtgtggtggacatatccatcttcgcctctctatccattatctccttattaagagctgccagcttattttttacttcctctttagccttaactgcatcatccaagcctttctgagaagcctcaaggttcataaccactgcgttagagtctttaccgtccatctgcttaatcgactcttgctgggcagtagctgcctctgcagatatcgaagccttagatgtgtaaaacgccgcgtttatagatgcaataactgggcccagatatttggctgccgcttgttgaaccttgcgtaatgcagaatccgcgttagcagcaaattgctcccagggggttgctcgtagtacctcatcaaggtagccgaagcgtttagtagactccgctactaccgcattagcatacgcctgctgcttctggaaggaagttaggccctggatattatacgttataccagtgttagccgcattaagtattttaacgtattcggcatacgcatcatttaaacggatggttacacctaattcgtctagaagctcaatctcctgcttggacacacccttgattacacggttgagtgcatcggtcatatcaacgcccagagtagctgctgccctacgtgcaactagtgcaaactcgctaatctgtttagcatcgaagccatacgcggccgcagtagatgcctgacgcattgcctcttcaaaggataccgcgtggccagtagcttcctgcagtgccacagcaagggactgaataggtgtgcctgtcttcgcccctacgatagaaccaaactgctctagacggttaagctgatcccccatctttaactgatcaaaagctgctttcagtacgtagaggttggacgccaatgcaccatataaaagcggcataggtccagttaccatagctagagctgcgaagtttcttgtagccccacgagcggatcccgaagtatttcccaacgctctggacgctctattagcagcgctacccgtacccgttaacgttgagttcaacccacctaaaccagtattaacatcccgaactcctgcgttaaggtcggtcagcttgtcggacactttgtctgtgcttcttgccatatcagacatagtggtattcatcttgttacccatagcgtcaatagcagctactatccggttcatctcggctaccatagtacccatattaaaacctgcagcacctccgccaccacccccagtttgccctaagcgaatgcgttttgcaatcagcttatcgattgcagcagcggatctaattgcagccgcctctattgcatttagctctggaactactttctggaagttattgatcatccgagtagaggaagacgcagatttagtagccatatcctggaagcccttagagaaccccctctcaagtatttgggaggtagacgctagcttggtttccaaagcgtttaaggattgtgtaatggctttaaactgattaggtagctgtagtactcctcgccctgcttgaattttggctaaagctgagtttacctgattagccgcttttaccagtaggttgagctgtgggataacgcccttcacagagttacctaatgggtttagcccaccaacactgctcatagatgcgaaagccctgcttaactgtcctaggttggcctctataccagataccgaggcttccagatctgcttttagcttggtcatggatgcaccgagtttattaacggatgtagaggtattagccaggttagtacctggtttgatcttagagagtgccgaagctgcctggttagcgttggcagaaagctcagctaagattttgttaactttgtctaagtgaggagaggacgacgtcatcgcagcggtgatatcaacccccattttattagcgctagtgctaatgttatttaactgggatgtgatccttaacacagacttcgctagtccaacctcaaactcagtgaacttagttcctagcataccgatagaggaggctagggttgttaaactagtagttgatgccagtttctccagagatttctgagtcctagatactgaacgctccactgtagtgaacgttgcagggagcttgcctagactctggttaagtccctcagaactttgagtggcattctccaaggcagcttcaacatccctgatctgtttagcggctttggatccaccacgctgcttgatgtctacaagtaactctcgtattagtctatctgtcatgattttttccaataaaaaaggcctagggcattaaccctaggccaagcctcacgtggaacgcccgttggaggaaaatgtaactcactatctgttagaagacttcattttagacttcttaatagctgcttcaacacgtttgcgagaggctgcaacagcatgtgagtcgaatatgttgatgatctggagtataagactcttctcatctggatcctcgacaccgtagacatcgaagaaaactaaaagggcactcttatctttacctaaataggttggataatctcctgggatataattatcagataagttattatatattgtaagagcagtttgagcgatttcaggaaagtcgtgtatctccacaaaccgtttgagaacatcggggttgggttcctcccccaatgattcacacatcgttagatactgctcttttgttattttggagtctcctcctttaacacatcgttctgcgaaggcgtcaatctccttaagcagtcggttcctgttttgagtcacgaaaagtgtctaggtggaagacggtgctattcatccaggtttcgaaggcgctagagttacgtaccagcattacggcgttgtcaatgctgaagtctaccttatcgcctaggcggtcctcaggcacgtctataagcatcagtttttcaacatcagccactgtcaggccttcccaaccttcaattgctactttgacgaactcttctgcgaatttatcgtcattctgaacctttacagcaataccattaacaaactgggtctcctgcgcagcttccagaattttcttagacagcttacgggaaacgtagttaatttttagcttaaagtgcggtaagcctgggtacgcggtagtaatctgtttggtgtccagggcaatgtctttcaggttaatactcatttgttaatctccaattagctttattcggacaggatctgattgctcagtagggattacgtcgtaatcgatcttgtacacgtcggttaagtctaggcgttttgtgattttagtggatggaaagtccaccacaatatatttatttctgatttgtaccggtaggcccatatcaggtttaatgttatgcgtggaatctatctgaagactcttcgcatagtacatcgatatcaaagcggatgagttcaattcgttaacgattgccctcctattattataaatcttattgatatcgaataaacttctgtcgccccgccactcgcattgctgctggaatgacataccggctgacataagtcctgggagcactctcccattcgaagatacctgaggtaatgaaaatggtagcacctcaccttgatcaagcgtatagctattgagtgggtggcctacttcctcaaagtatcccgactcgataccaacgtttagcaccgggacacttttatctagagaaaagtcgcaggtggtagcaaaacagttatcgaaacgtaagctcgtgttcttgttaataatatatacggagaacattttaggctcaatattattactgaacaagggcatctgatacattccgtctacctctataaaccccatcaactcgaaaaatagaccctcgagagcattgctagagaagttaagagttagagaaattgaagaaggagactgagcagttatcttcgaataggcgtagttactgcgtctgtgaatcgtcctacgatttgctttaaactcttcataggacgttccagcagtgtaatcagacagagcgtcaaatccgtacgccctgccatcgtactcgatgactactctagactcccgcattagggagtatagcattagttatccttattaaccgcctggggcagccttaccgtcaccagtggagatcagcttagcaattgaagttttagtatacttgtcagagaagcccaggtaaccttcatcaccagcgtccatctgagacgggatagctttgaactcgatagaagtacccagcacatcgtcagtctcgattgacgggatgttcaggttagcatgtttagctaccagaacagctgcaggacgagcagtatcgtactccccacctaggatgattgcaacttcaaagtcattcacggctttcagctcggcgaccagatctttgtacagctgaatggagccattagcagcatcattcatgtacgcagttagggagccagtaagctcgaaggaaccagtgaatgaaccaatcggaacatcgacacgcgacatgacattaggagtcaggtacgttacgttgttgttcatggtgaaggaacccccagtgattggaatattataggtcttaccaccactagcgttgtttttcagcttaagaacagtcagcttgttcttaatgtaggaaccctgtagtttagcatacagagcatcgttaatccctagggagttagggtcgaatggctgggtagaaagagtttccagacgagtaccattaccagaccacgttacgcgaccgatatcgtcgatatcaacgttaacttctgcttgaccaacctggcagttcttgattacagaccaggcgttgtcagtcagaatgtagatatgcagcatggccagttcgtggtatgcgttatccttgaagttgacaacaaggttggtatcgttctggaatacaccagtagtaccgtccagtttcagagcggcgcctgttgacagaccgtaccacagtaggtagtcaggaaggatctgcttaccagaatcgtcatacggcagaatataagtggagaagctccactcggcagcgtttaacgagtcgttgaagcgctgcgatccacgagtcggcttcggaccggcttcgtttaaggtaatatcagtggagttactgtcctgaccccaagagatgtcatcctggactaggatctcctgagtattggccttagtgaaccccgtagtaacggttgacacgaagattcgtgtattacgtaatagttgtacagacatttaaatttctcctgagctgtaacttatctatccagcgctcttctcagaggcatataccggactgttacgttaacttgagcaaaaccaaacggggacagtataccctcgtctgtggacaccgacgtgatctgcatgtcagtggcttcagaatcgatagttgaaccatcaggtttcattatagtatattgtaaatttcctccagtgtcaatagaggtttttacatccgctatgagtttctcaagttgcatgttaatatcatccttttctttatcatagataagaataggaatttcaaggtaaacccactgctgtgcagacggcaggtagtttccagtttcggtacccacatggactgctatgtaagggaactcattgatctgctcaaacgaataagtctggcgggatacgttcccatacatattagtgaagaactctgtgggattactcccgtccatgtccttcttcagtcgttccactagggcatcagcaatacttgttctgtaattcattatgtaccctgatttactcttatccggtatctagaatggataaggtctcttgcagccttagcgattgcctcgccgatcagcttctgcgggttcctagcaccagggaatggtcgtaaggagagtccgcggtaggtagagacggcaggattgaacacagagtaaggcttaagcatgtagttatacgtgatgttgaggtcaggattctttgctcccgcgtcttctcttaacagcacgtctttaatcttcaaggaattagcgaaccgccccgttctgaatttaaggggtgctcccgcctttttcatatccttgactaagtattcttttgctacgagttcaagtaacgctctaaggtttgtgtttgagacgaaacgcccagaagcgccagaaatagcaccagcgtaaccgttgtcagcatctgaaggatctccaaagttaacctctactctaccagtagatcgttttcttcctattttggattttttaccagtgatactatttagaaggttatcgataacaccaacgtcgccttctagattaagtgacgacgagacagcttttaaaatagaggacgtccgaacattcagtagatcctccgataccggcttggtaaatcggaaggataccttgcctatggtgccatctttgtggttatccatagtttccgcactatatatcacggtgttcttagtggagtggctaccaccactcataatgtccagctgttctttaactatctgtcgagctaggtcgcccaacgccactacagcctccggtacacttcgattatggtacggatgtgttccggcacgccagatttagtggtattgaaggtaacggtttccccgccaaatgtacgagactcacggtagtccttcttgacccaatgatcgactaggaagcacgccgctagtactaagtcatcaggaatggaggtgaagccggtctgggtaaactctacttccatatacccctctggaggagagaattttagcaggagagtaccatccgggtagttcttgtattgcgacttatcgatctcctgatcgttaatcgtaattttagtgatcgtgctaggcacgggagaagacaggaagtactttttgcgtgctggtttagtaggcaaaacgtctacaacgctagcactgtcgtcaatacctaggagctgagtaatcagagcattagccgccttgattaacattgggatatttgactctaagtcaggacgtttaaggcctccatatgttctccaatcagaatctgtcatgaattgcatattttacccaataaaaaaggagagccgaagctctcctttagtcggcagtatagccaaattaagcagcgtaagcaccagcaactacgccattctcgaagaaacgcatcaggttcagacgctgagtaacgtagtacgcatcgcgctgacgttcagcctgacgctctttctcaacggtgattgcacgctgacgaggaacgatgaagttgtcacggtaaacaactacacagaactcagctcttgcagccttagctgggaagaactcagaaaccagtaccggcagaccgtagatacgaccaacctgaccctgcagtttgatagcagtggtagcagtaacctgcgcaacgtcctggaattcttcgtcttcgatcagatcgtagtaagcatccatcgaaacaaccagagccagtttgttcagatccagaccgtggcggcccagtgaacgacgcagcttgtgaatttctttagcggtaactttaacagaaccatcagctttagcagtagtagcaactactttaccatcgtctttagcgaactggatcagacctttcggagtaccagcagcaccagtaccggtcaggaacgctttttcgattgcgatagcgtgagcttcaatcaggcgacgacgcatgatcggcagcagagtgaagatagcatcttcttctgtttcgtcggtcatatacgctttagcagccagtttgtaagtcttgaaggtgatttcagacagcttggttttgtcttccgcaccaacagtggcaggagtaccgtaggtagaggcgtcaacccagctagcttcaccagcttccggctcaaccatcatggtcagcaatttgctagacatcggcagttcttcgaacatggtaccgataatcagtttagcctgaatgtcacgcaggatacgcagggagaagatggtttcgtacgcttcggtagaaacttcgatagaagaagagccgttaacagctttcaggtgggcttcgccacgcttagtaccgaatacatctttctgcattacgtaggacagaagaaccagtttctcaacttcgtcttcgaaatcttcctgcttaccaaacattgccttagcaacgccatcagctacgaaagaacgaccattttcacgagcggccagcagagatttgatttcttctttcagaccagtgatttcttcctgctgggagttcattgctttaacgaacgcttcagcggactgtttggatttctcatccaggttttttacaagctccagagcttctgctaggtttttacggtcttcaccagttgctttagcaaccaggtcttccatacgtttgagttctttagcttcctgctcagcagcaaatttgcgagcttcttcagctttctgagaggcggttagacctttaagctgctcagcaatgtcacccaggcccagatctttagacagttgtgcgatatcgtaagacattattatttctccattatcctttagcgtaaccagcggccactaggaatttctctaaattagaaagttcaggttgttcaacaggctggacctgcgaagattttacaaaagacttacgaagctccatgtaatcattatggtttacagacttcgaaaggctaaaagttgagtcttggttgcagggaaccgagactacagagatctcgagtaactccagatctttaataatgaacgtttcagtcatatcgtcccattcggcgtctttaatatagaagcctacagagaacgttttaagaacctcatcacgtattaatgagtaaatctgtagatcagcagcacttacctcaccctcaaccataagtccggactcggttggtaccaggtctaggatcttaccaattgggcggctgtggttatggccgaaaagcatgatcgggttcttcataaaattcttgagggcgttactggtagtccacgcttcggagagaataacgtcgccggcgcggtctttggtaatcgtgttagcataccctttgatttttaaaggaggattatcaccctcaccgacagctttaacagatttaatctcagcattaagattaatattctgcatcgtttgctccaaacactttcgtgttgttcctcagttttcagatactattattacataccaaatcgcgaatgtcaaaagatatttgaaaatcccacacggtgtgtggaattagtaggcagtcgaaattggttacactgaaaatagctatgtactagcgtagaaaaatggggagccgaagctccccagttaacagatattacacacccgctgtaggaaccttaactgttactgtagcagtgtcggtcttattgccgtcagctgtcttaacagtaataactacggtaccacctgcagctaagttggagggaacagttacagtaccatctgcagctacggtagctttggtagtatcagcagaagtataagttacagacttattggttgcgtcagctggggctacggtaccagtaagtttgccagtcttacctgcttcgattgtaatagtcttaggttacatagtgacaccggtaaccgctacaacaggagctttgacctggatagacacttcgctagatttaccacctgcagtggcagtaattttaacagtgcctgctttagacagtgccgtcactaatcctgttgagctcacagtagctagggtagcatcgctagtattccacgttacagttttgttatctgcgtttactggtagaaccgttgcagtaagctgtacggtcttagtataatctaaggatgcgggagcgcctgtgatactaacagaagttaccggtactggtttagttgcttctgcgtaggcttccttaaactgcttccaggttttacggttagtcgcagcatacccgtattccttacgcaggatctggtaggtgaggtgtgccttaacagtagccagcacattgtgcgcctctggcaagccgtttgggaatagggcttttagtgctctatagtcgatcattatttttcctcgtctttatttggtgcgccaccttcttgtccacttactccggtagctgatccagctacgttggcagggatgcgaattttcttcatctgctcgtcagccagttcctcataaccaagttctatacgaccttcgttaccggtaaggataccgttgttgaccagtgcagttacgaatttagcctctttctccttgtctggagttagtgctactacgtctttagtattgggcgttactttaaaaccgaagaagaacgtaagcgagctacatactttattgagcataggtacaatagtcatgtagtagaacagctcaatgttcggtcgaatattggcgttgttacccccatcgatcaatagttgtgggaccccgagagcgatacatacgtctttattaaaacgagcaatatcgttttcgaagtcgagatctttaaaagaggagatctgggagtacggcttagccttcatcccgccatctagaataagcacagttgattggccggtactaggattatagtccagctgaagctcttcttgtttacgttcacggagctttttatttagaatttcatctgtttctaagataagaccgataaccgtaccgttgtccaggaacttctccttgaactcaagcattttctcacgcttagtaagcgagttaatcacggtagctacgcgagactggcctgtgatctgggagttaataccaccattctggccattatctttgatgaaaataatttcatcaacgcgatagtcgatcatattattaaagacgaatttgttaacgaattttttgtcatctgcttttacctccattagggcagcaggcagatggtacagagacgaaccgtcccaatggatatacgcacacccttcgaatagaaggtcagacactattaggcgtttaaaagtactggaatccatgtatgggttagggcgaacattaagcagcgtctcaagagttttactcctgatcgtgccataggttgttattgttttatactgttcacctacggtgtaggagcactcagcggcgctgtcaattaccatgttcgcggatctattaaggatctcaatagacgaataggctttgccagtcgtgaatggtttgacgttagtacggtgactaacatcctccaagtccctgattatgcgttgtccgcggtttagtttagtaactaaccagtcacgaatagccattataggaaccttgcgaatcctgatttctcagtcttgacgtcagtcggaagccacttcgcaaagcctgatctttcgccagtattgcttgtacgaggtgcctctggattcatacatctttcacgttgtttctcaacccaaatcttctgtttgttagctgaaaacaacggaggttctttcgtatagaccttgtgtaaggtctgatgatgaaagacacataaggtgaccgtgtcctctactagctcgtgccaataatgtttatagaacttatcccgattacttaggacgacttctgagtcagtgaaatccagttggaattctttagcaaagtttttaactagtaaggccacagtcgagtagtggtgtagctccaggttttcctgtgagtcacaaatggcgcaacggttgcctcttttgtactgggctttgattccgtcacgcattatggagattgcatctctcttatattttacattggaagccaaagtgtttctcctcttagttgggaaaatactacttcgggtacagcaattaaatattcctctcattcaccctgatgtatatgagatctctcaaggtatgaatatattataactgccacacacgaaattgtaaagtgaattttataaagttggaacggaatttgtactcactactatccgttccaactcagctcttatttgccacgggaaatcgagtagatgccgtaacgcagtgcgtcacataagtgagagttggcatcatgacgaggtttctctctggagagcttctcctccccttcctggaagtcccacttgtagttctggagtgcgtgaattaacgcagtacacgaggcgtcgacaatgatcttaccctgctggaatagagcagctaggcatgctagaccatctagaacagattttttggcaggagcagaggatatttcatgctcgtatgctaagtcctgtcggaactgtgcggctgcggagtcaacaaagatacggtctacattataccggtctatacagtgttgtatgtacatggcatgctgtgctgtagtcttctctgcctgctggtactcctcaaggatatagtacacatcttggtcatagtggtacttaatagtcagtactgctgtcgggtctctgtaaccaacgtcgatacctagaatggtttcgaactcgtggtctgcggcaaagaaatgtcccatacctgcgagatcctgtacgtgctcggaaacgctaaaggtatcgtagatctgaccttcgaatactgagaagtcagcttcatattcctgtttgaaatagttcttagatacagtcttacgtgcttcctcgatatctgcaagagatacgcgagggttatctcggtatgtaccgtggattgatacccactgcggaagatcttctcggaacccttgctcgtagaagcgtttgaaccagttacccccacgaggagtggagataaacagggctttagagttgggtttgtctagcgtaggacggagctggatatcgaaagcgtcaccaccaacgtcggagattgctgcttcgtcaaagataataaagtcgtaggaacgaccaaccgcggagtcagcctgcgcagcggaagccaacttaaagagcgaaccgttagcaagttcaatttctttatctttggcgttctcacgctcagtttgaaggccatatttcttaatcagacctttgatctgcgcccacccgatgtttgccagggagtagttcggagctactacgagcaccttaacgttcggctctaggagtttaaggaagcctagagtatacgcaatgaacgacttgccaacacgacgtgatacgcatgctgtaacgaaacggtgacgcgggtcttccagtgcgtttatgattgcgcactgcgggccatttggaacgatcccctcggtggccagcaagccggacaccgggaatttaaagaatcgtttatcaacaccaaaatccaccacatcagtcgtattaatataactacgtgagatttccattatttaccggcccccacaatgcgtgacaggagatccgtataattagagtcgtgaccacctgccaggttgatctgagtgttagtctggtgtacaggagctttagcttgcttcaccttctcatactcaatctgcatcttcatctcatccatcttcatcttgtgcatgagcttgaggatatccataatatccatctctgaacccattccagtttcatctagttcctccattttcatagttagaacagtgtctagaatgccaaagaatttatcacggttacggaagccagattccatgaagatatccgtaaggtacgctttgacctcaggtttacgcataatctcccggaatttaggttcctccattccaacagctaacgctgctttcgcaacgtcgctgccagactccaagtaggcctctataactagcatgccttccggagacattgcatctggtacaattaaatcattgctcatattgcctcctttaggcaagcctttgcacagcaatcctaacatcaggaagaatcactcgcatgttcataatattagccatttcagtgttaacccatacctcaacactgccatcagctctggcaaccaaccagtatgtaatagcatagtcgccttgagtagcagagttagtagtagcaggcgcccacatggccttcatttgcatggcgttgttcccaggaataaccccacattggactaccgtaccacgaataaagtgaaagggcacacacatgttaacaggtaaacacatgatttgatgcacacgtttctggaagtggtttccaaaaattctcagcctactatctacctcgctccactgggtaagatcttctagggggttataacatccaatccctgcagcagcgatccactcatcgtttttccagtctagagttacgatgcaagccccatttctagagttattaatccctaaccataaggtggccagatgatggctggcgttaccgctagtacgtaggttcccaccaatatcagcgaagccggtaccacctaccaggcggagaggtcgagttgcctcagaccatacgggaccccattgatttccaatctccggtggattggatttaacgtaccattgagcatcagacctaaagttgtataccccaactgtggttacgtgcatagcactaacgttaccctgcccaaattcggcactattatccggtcgagtcagcggctggttgaattgggtgtacccattattaccaatagtagcatccccattaaatctagcaacattagttgcaataaccctgatgtccggtctattacctgggctgtagtttatatcgttctggtttataaacttccacccggtgttcattaggtttataccgtttacaatgaattctctggggctgattttaatctcttggttgcgagagccaaatacgttttcaacgttgaaaccctgcccattgtatttcatgttagtaatataccagcgaacacgtttaggaacacggaagttattgtcacggtaaatggcattgttaccccaaccactaccagcattgttgttatctgtgttctcccagcccataaaattgttagggggtccacggaagaaacctgctttatactcaatttcctggtatgactcagtttggatattatgtgagtacggcccaccaatagggttagagctcttaccgtatctagggcccatgtgtccgtgtatgttacgattgagggtctccccacgtaaacatatactgttaacaccagtagtacgcatccaaggatggcgcattgcatctgcaccgatggtaagaggtctattaggtgcagttatcgaaccacttactatattacctgggaaagctcccctatagagtacccaaccagctttgatgattgtctggaaatttggtcgtataggttgaccaaccggcggcccaggacccctgtcaccccactcggagtttactccccaagtgtacatacacccagtaccatctcgtagcttctcgttaatagtacctggcgtctcttcgaagtagaaactaacatccatatgcagatcagcagaagcacaaacgttagtcttcatactagccatagtacctgcagaagcctgggaaccgacagtattactaaagtaagcgttatacgccttggcgcctacacccagggatgtaccgtaaatgaaacgtctagtaccatcctcaaactcaacctcagtcaatactactctgtcgtaatctgcggacagtacctgaataattctgtctggcattctagtacaacgataccaatcaccaccatcccagaggtctctttcgtgagtttctaaaactacaacgtgaggcatatcgctatggaatatagtatcccaacctggattagtgtggttattaacgtctttattgttgccagaggtaagagacaacacttttttgtcgcctatccttcctgcataaaagcccataaaaacctcaaaatctcacttgctaacaagtgacttttataatataatattattataaattaaatcaaccgccaagtaaaccagattttttaaaaccatctaggaggaccactatggaagtagttataggagcacttgttttactctcaatcgtactatttgtcattaccgtgaagcagggtaagacaatcaaacagctagaacgcactaacggggtgttgcaaaagtcttacgacaaccaaaccagtttgctgcataaggcacagttaaacctgtctgaatgcaaggcagaactagaatcagcaaacaaaatctacattactaagggtatggtgtaaaacatgactattgtattaattttcacaacattctttttcctggcagcagtttggtttggtgtgcgggcacatgacctgcggaacgcggtagtagcggcagatcttcgtaacaaaagtctgcatcaagagatccttcaaactcgggcagaacgtcaagtagcgatctcaaaacaccaacgagtcatgaacgatcttcggaatgacccgagcaacccgtactacatccctccagtgacaccacaggtcgcgagacgcaagcaaaaacgggcaggctcggataattctcggaaagtttcgggaagtccttcatcgaactctggaagttctcggagcgatgatgggtcgactgcagcaatcatagctacaactgcggcagttgcaacgtatagcgggtatgactcgggaagttcttattgcgacagcggcagtagtagtagttttgattcgggctgctcgttctaagtttgcctaagtactccctttagccttttctccaaatttcataaagttacacatggaggtgggcttagagggtcggggggtggtatggtagtccgattaccccctagctaactattagtaccctaactatttcgctagggtactattagctttc

SEQ ID NO: 63 - DNA, 175532 bp, unidentified
  source 1..175532: mol_type = genomic DNA
ttagtagtgactgaatcccacagttacatcacgcatcacctgataacgacatacacgcatcttagcgttgtcgtaatctgttgggattgctacaacatcgcgaggattaaccttaacctgaatgactcgcccacgtcctccgccatagtgaggcaggtacgattttgcggcaacatgcaaaccacatgaacaggttcggtttttattctcgtctacctggttacgtggcatttcaaccacaacaccaggggagttatcgaacttaccggaagccagatcgcggaagtcttcacgaacacgtttccacgcgtagaaatctccatcatctgccagttcgatatcgttatgcaccatgaacccgtaaagctgatacacagcatcgcgtgaagggttttccatcaacttctcgaagaagttcaccaggtgctcgtaagggcgatcgttgtacatttcacgaacgatacgttgcgtgataccgctgtcaaacacgatatctttgtacaggactttatgcccgatgattttaatgttgcctttgctgtaaatcttcaacgcttgcgttgtgtccaacagggtagcaactccctcaatgtcacccttaaccattaaagcatgtgctttttcgaagttagggtgtgacgaatccgctgtgatgatcttgccgtccagtaccagagtaatgaacgattcagaaccaatcattttagatttgacatctgtttgcggaagtggtttcgatgcttccgtattatacttagaatgctgttcggtaataacgcgcccgatggttcggacgcttacaccaaattgtttagccagtgcggttttgtttgcgctggtcagaaagccctcataaactgctttcttttgtacatcatcaaggatcttaacgtttctcattatttccaccgtataaggttgaccaaatccatcacaattttatcatcattaaacatactgcggaatgtagaataagatgaatgtaacaacatgtaatgaattgatgggttgcgttctgcaaataaatcgtaagcagtatcaacgcgttctttcatatctttccgcattttgtaatacttcgttgacatttcacgaagtaacgggttacgcaccacagtttttgatttgtttttgccctcgataacatcataggtaaacttaccatcaagataatcgagcaacaaatacaattctggattatagcggtttttaaccatgcgatcaagggttacatccatagaatcgcgtaaggttcggatctcgcttccgtggtttgatgaaatccatgcagggaaccagttgggtttcatcttcttcgctgtgtctgcaaaacgttttacaagatagtcatcaagacatttcatgttgctatctggaatgcgactccacagagagtttcgcagaaccatcacttcgttcagccctgtaaccgttaacatggtcatcatactgctggcgatgctacccagagaatagttcggtgcttcgccatccagtcggctatattcatcaatcccgtacaggcgcatagcgtacatttcatccagattcacgaactgtgctttggtcaggtacagatcatttttctgtaagttgccccgatcatccaggaagtaatgatatgctgtaggcgttttcgggcgcgattcacaatcaccagaagatgattcacgcgttgctttccagcgcttgcgatcttccgtgtacacgtcaaattctttggttaattcactggttttcagtgtgacaatttcggattcgtcgaaatacccagttctgatcaagtcctgaacaggatcgctattaatctctttggttacgaaactgatacgatccgaaccgtgcaacatgcagtaaccgatcaggtatggacggagtgaacgcgcttcattgtcgttttcaacaatgaacagtttcttctgtcgccacggttggataatgcgcataacgtcctggcgtttggtggtttccgctttgtatgtctcataacggcgtccagatccaacgcgctcatatacacattctttcccgtcatatgggttagcccaaaagccccagacgtattttccggttgcagtctcaggacttttgatatgcgtcaggatttcagccagtgagtttttacccacacggaaacggttatcgcgggttacaaatgtctgtaacaaactaggcagattgttgaaccatacgagtttatcgcgggttgttttttgtctgtcgaactctgcaactaattcttcgtcatagcgtttgttgatcttttccagtcgatccaggattacttttttggtgactttatcaaggctcaactcttcacgcgacggcatgaagtccagcgatcccagagggaaatccagaatataagcgtaattgctgttacggtagcaatagaacagcgagttttcgaacatatccatgtcgattgggtagcaaatgttacccatacgcgcgtatacgccggaatagttgatagacttataacggacgatcccgcgatcgtctgcttcttttggttgccagtttacatcaacctgaacaccgataaagcgaggacggatgcccgtaaacggttcgtaaacacgcgccgcttcacgttcccattctgcaatatcttcgactttaaccggaacggtgatttgaactccgttaggttcgtctgtttcgatttcgtagatttggtcaacgaaaggttcaccgttatccaggtaagccgtgtatgcgcgtttaatgccgtcctggatggattcgatagtgaatgtttcggtgtagcagaacggggatttgctacccagtcccagcgccccgatcagttcgtcggtgtcggttttggtggattcgaaataggttgtaaacacctctttaaccatccagtcacttaaccctgtgccgtaatcacggacgatgaaacgcgggtcgagaacagttggcaactgaacatcgaacgggttcatgttacccgctaccagatgtccatcaatggcgttacaggagatctcgcgaatgattgcacggatcttgtatttgtagatggttgatgacaggattttgaacgttttcgcactggtagccattttaaacttcgtgcgttcgcctttatcgaagcccgttgtgtgaatggtttgtggtgctaactgacgtaatttcattgtttatatctcacttggtgttaaagatgatgttatcgcatgaatatttcacaggcttttgatcaagcccatattcaacaggtgtacacatccggtcaaggtattcgtaaacctgttgcttctgacgttcgcggtctttcatatccatgataccgaccacgatagcagttacaaaacatattgcaatagtacacaccacagctattgtaatatattttcccgtttttggtgcatcatatggtttcattgaatcgcctctgcatattgttctggtgtcaatttacgcgctactaagcgccctttggttgctcttttgtttcctgaaatgtagatgttcgcaaggttgcgtttaccttcctggatctcattgtacatcttttcaggcatattgcactgataaacttcgccgttcggagttttcaggaacaaagcatacatatcctttttgctttcccgaatcactgattgctcgcgaacacggcttttggttggcgtaggctgtgcgcccaactcgatagctttacgctgccatacgatcccgtgtcccgctccatgtcctaccagagcatgagcaatttcgtgcatgagagtatctaaaacgttctcgtatgtgtcttccttaacatgatcgcgacgtaactcaatcaacttacgagtgtatgaacactgacctaaagttcttttgaaacgtccgttgattttgaaagaccaatgagataagccatacttcgccatgatgcttttggcccaaatggttatttccatgtcgctacgagttttgaacattttatatcctccccaaatcagtgagaacactataacaaaaagcctcccgcgatgcaagaggcttttgtaaattatttcaatttcttcgaaagttctttcaaatcattaagatattcagttttcggggtcgtttcttcccagtatttcagttgcttacgcagttcgttcgcttcgtcttccagcttttgacgttcatccgtggttagatgatagatgttcatcgcaaccagaatttcggcgtggttctcgcaacccgtccacgtagatacaagtttaaccgcttcgctgcgactaagccccttcaatgcgtcaggttgtgcgatcatctggtcgatgaagtcaaccttcgccagcgccttatctaacgcttccttagtctcctggatgcgtttatcaatacgctgttggtaaacaccaatacggatatcaacgaagtctttcagcaacgtttcaggacgctcgtatgaatgcagtttcccgttaaagataacgttgatgttcgggtttgagttctcaatcaatccgaaatctttcaggatcttctcacgggtaagcccgtttgcgtactcacgtttcagggtgatttcgtagcggaaatcttctttcgatagatccttatagcttacgatataccctttctcttccagcttatccagaatagaaatatatttcacgcgatcatacttgaccggaatctctgtgatcaccagtttagttttaccctggagttcatacttgccgtacatcgtaccgttttcaatgtcacctttgaaatgcgggtatttcagatccagtgtgaaatctttcccgttcaggtaactaacgcatccattcagaaccgaaatcggatcgtgtggtggaatgttggtagcgtatgctttcgcgatcccactgaacccgttaaccagtaccatcggaatgattggtaggtaataggctggcggtacgtgttcagggtcttcatgtgggattgttaaatcttcatccatgtagatcgccttgaacagcggagacagcttacatttaatgtagcgcggtgcgcctggctttttaaccagacgggaaccaaagaacccatcgcggtcaaaaagcgggatgttattgcaccagtgcgccgccataagagacaatgcctcttcaacggatgtttccccgtggtgataaccatacattgcaacaccgccagcgatagaggctactttctggaagcctgtaccgcctttcgctgcggaatgcacgaagaaacggtgaactggtttgaacccgtctaccaggtgcgggatcgcacgagaataaattgtgtaaagggcaaacgtaagcccttctacctgcacaacgtctttaatacttctttccatcatttcaccgaaaatttatgttttccgttcacccagtctttacgcggatcggattcatcaccgaaacacagttccagaacgtctttgtattcgtcgcccagtacgattgtatcgtattttaactggtcgcccaacacccgatcgtaatcttctttacgtaaagaacccagccctttgatatatcgtacctctttcgccttatcgcggaacggtgcgaaatcttcaagggagtagaaccatttttcatctttaccgactttcgcaatgataatcggtgtgcggatataacggatctttttcttctcgaacaactcaggccagcggctaaagaacgcaatcagtagggtgagaatatcgcccccgtcaacgtccgcatcgaccatgatcccgatgttgtcgtaagtcatttcggaagagtcgcctggatggagattcaggatcgccatgagttcagacaattctttgtttttgagcacttctaagttactcattccccaggtgttcaacggtttgccacgtagcggaaatgcgccttgtgtctcttcgtttctgcactcgataaactgccccacagcggaatcaccctcggtcagaaacaaagtggtttctaccccgtcagtgtcgatccctgatgccggaacatgttttgcaaccttcgcctttttcgctttcttcttcgctttggtaatggctgctgcttctgctgcctgtttgcgaatcagagcggactcaatgatcggagtgattatttcagaagtatccataatctgtttcgcgatctttttgtagttcagtccggcgtggttgttgaactccccagcggtgttagtcagtttttctttcgtctgactatcaaaagctggtgcattgaagttatgcaaaaacacaaccaaagtcaagcattcttttacacgggctttcgggatctcgatagcgtgtgttttcttgatcatcggttcgagttcagaatagataccgtcgatcatggtgtcaacatgaacaccgccgtttttcgtatccagaccattaacgaaggatttctgtttgaaaccgtcttctgtgctcgccaggatgaaactgattttgttgtttgtctgggtaatcgttttatcaccgtacatcgcgccatacatcgcgaatttgttcgggaggatatcgccgttatatgtgaatttaacggcagggaaagccactgcaagcgccataaggcggtctttgatgacttcctttgtctcttcgtcgataccgtccacaccgaagatagagaagtcaggggtaaacttaacggttgtcccttgctccttcgtcgggctggtgcggtaatccatgttctgcgctccgtccgtacaattgatcgtgactttgcgtttaccgttggatgtctcaccgataaagattgcgctgtaacagtttgtcaggaaagaacctacaccgttcatccccattgttacgcggttttcgtcatcgaagttagaaccggatttagccattgtccaggctgcaacaggtttaggaacaatcttcccttccggcgttctcacgtcatcttgtggaataccgcgcccgttgtccgaaatcgttaccagattgtgatcaatcttcacttcgattttgttcgcatatttgaaatcagttcggatcgcttcgtcgatggagttatccaggatttcgttgatgattttcaccaacccttccacgtattccactttgcggaattgccccatgataaaacgttcatgggcttctttgttcactgaacccacgtacatattcggacgtttgcgaatgtgatcgcgatcgctcaagcagaatgattcatccaccttagcgccctttgctggggcttctggtgctttctgcggctcattatcgtccattaagaaatctaaactcatattcacctcgttattagttctcaggcattatatagggttctatgaaaaagaaaacccctttcggggttttacttgttgtacgggaatccgtctttcaccatctgcggcttatcaaccgttcgtttcgcctcgcccccgcaatcacaatctttcggttcgtcgcggcttgcgatgctggacattttcggaaattctttttcgcacttggtgcatttataggtatatgttggcattaataaatctctgacaatggaataaaacggatcggggttgcggctttgctgaaaacacattgcttgttccctgcaaacatgagatcagtttcgtacaccatacaaatatatccctgattctccaaaatttgccgctcccagctatcgaaccatttagacaacttctgcaatgaagagaagccgaaaatatagctacgataatttttaccatgttttttgaggttacgcattaaacgaaggtcttcgcatggtgcggggtgacgagtctcggagataccgaagtttaaaccgaactcgattccatgaatatcgagatactcatagagatcgtcttcatcaccgacacaacccgtatacgggcctaattgcttacaccatccatcatatttggataatatagacgctttcaattcaacgcgataaaccaacatgatccgatcctcgtaattgattaactacaagtagagtaccacttatctaatttcttatcaagcagtttattgatcacttgcgcgatttctgtcgtcccgtgggttgtactcagtttcaggtaaatcacatccagggcacacacgatcgcatcaacgctttcttcgacgatatcaccgccgcgttgaggctgaacgagacattcggagatctccccaacctctgcggacaggtggtgaaccacgtcgctaacggttcgttttttgacgctatgagcggtcttgaaaaacttatccagaactacagcggaattttcgcgcggtacttcctcacctttattgacgtggatcgtaatttcagtttccggttctggtgcaacccataccggattgaaaagccctttcatatcgttgaactttacaggaacgggaataccttcaagataaagaatccctgtttcttcatacaccatactgatccggcgtggtgaattgaagtccatcggattcttacgcaacgcgtcatacatacgacgaatcggatcggcttctgatgccatttgacacacagccattaaaatagatttcggggcgtacatatcgccaactttatacttgctcatttacaatacctttatgataaccaacaataaaacagttcacttctggacgttcgccagggaaatgcacacactgcatgacgcgttcagccatgagttcttcgcccaaataaacagaggtggtttcttcgttgtaatgacaatcatacgaagtcttaacactcataccaggcaatccggcgatatgcataaactttgagttcgtgcatggtttaccctcaatgttctttccgtttacatcaaacgttgcaaacatttcggttttgctgttctttgggcgtctgctcatttcttcacaacctcattatatgttgacaggttccattcatgcacttccggcactttggagtaatgatccaggaatactaactggacttgcataacattagcacgatccatattgaaaaggaaacgttgcggggaagtaatacacaggaaatcttcggtacttcctctgcttgcgctaaactcttttgtttctccgccgtcaaatttagcatagactggcgtagaaaaatacggggcgaatagttcgcgtttggaatcgtccgtaatcgcgctgaaacacacgtctacgagctttccggttccttcccgtctgatggtgagcattgtccctttcgtgcgccctaagacgtttacagagcgcgtagtgacatcaccaaaagcgtttgtgtaactcacagtctccacaaagcccatatcacgacgctgttgtagcattgcttcgtgttgtgcttctacatcctgttctactactcgttgtgcggcttcatacgccgctttgttcggatctcttgattgccatgcgaagaataaaacccctgcggctatcagtccgaagattgaccaacttgcggtcgctgatagtttcattttaatattccaaaggggccgaagccccgattttagcgaagatagcgaacgtaaccgctacggtcgatcgcgttctctgggttgttgaagatattaccgcgaatacccttagcaggtgctttccatcctgcggctttcaggatattgccgtcattgtccaggaaaccagcaactgaacgctgatcgaacatttcaccagtctgtttgttgcgagtatcctgcacaatacgatgatacttacggcctttttccagaacgaaaacagtttcaaagaattcgttttcgaatgcgccaccgttacgggctttgaacatcgcatccagtaaaggctgtgctgcggctttcagttcgtcaaaagtatacatggcaatctcctaaagtctgtttcgtttcgatgggataactatatcaaagctatcccgtgaagtctttagcaaaaagtgctatttgttaaacccgtttcccttgataccatttcgggaaaataacccggtcaataaaagttctccccaagttgaaactatcaccgaacaggagaacaccaaacaaagggtcgtgcttgatatcgtttttcccgacagtcttcattttcccttcgtggatcacggtgtcacccaccgtgatatccttgatgcttacttttacatgatgcatacaatcacctctgcgagtttagcaggttttgcttctggtctaactttcaacgcatcattcagattcttttcaaccattgctaccgcgtcgttttcgttgaaaccgttcttaaccaggactttaactactttggcttctaagtttttcatgatgcgttccttttgtctgtttcgtttcgatgtgtgtaatatactgcatatcgaaatttgggtcaatacccaaatcaaagaaaatcgtatttttcttttaatttttcgtaatacgtatcccatgcggcttcgtcgttgatgatctcagtaccgaaccgataagcacgtttgcgcagttcgaaacgttcacggatacgctcaacattgattttcactgattccggcgttggttgccagtccgcgcacaaatgacgatgaaacagggagtttgacaacggactaagatcgaaatcttcgtatgcaccgtccatgtattctttaccgttacgcgcaaggtattcagcacgtaatgcagcatgacgatcgcgaaggtatcccagcttattgtaaaagaaggttacgtgtccggttcccagcgtatacacagcagggatttttgacaggttgatttttgccttaccggataaaacggcattgggaatgcgggggagttcgcgcagttctgcaatcaggtgttcgttcagaagaagagaaggatcgattgtgttaatacgtgtcatagttgcctccgtttggtatgtgcgcaatatacaaaaaagccccttgcattgcaagaggctattaaaattattttgaaagaggtataagcatctttcgcataccgccgttttgtgtggcatcatacacgcgtttagcatccatgagggagagttcaacatggtatgatttccctttcccgtcaaaatcaaacgttaccgtaccgcttgctacgcttacatgagtaaagatgaactcacccgcgaaatgctttcgaaacgctttgtcgtgatccaggaaccattcaaacgcttccccgtgctggtacagtctgacgataatcattgaaactatgatgaaaatcagaactgctgcgacgatcgtaagctctttcatcacttacccctgtttacagattgacggtgcagcacacggttaacgcgtggcgcttgatacggtttcattttgtacggtgtcggatcagagtattcgatccggttcggcattgcgtacagttcaacgcgtggttgaatccagcggattgagtcgattaacccttgagttaacgcacgaccgaaacctacaccaactaaacataaacgcataatatccccttactgtgccagaatgtgaagccattcacctaaccacacgatcgcctgataagacaaccacaccgcaccggatacacacgcaatcacaccaatgatcgcaaatccgattaaaatgttcaaaccttctttcaaatcaccaaacatgtttcatcctcttttgtttcagtccctacaaaataacaaagcccctgcacgaatgcaagggctttttatcataattcgactaactgaggcaatttcagaaccatccccggaaggatatagcttgcattgctaacggttttacggttcaacttagcgatggactgccagcgctcaccacgaccgtataatttttcagcgattgaatacatgctatcgccaggctgaacaacatattcatcgtattcgactttaacgaacgcggggttcatgagaatgtcaaacatctgcgcttttgcttcgttcagtgtttttgcatgtacagttttacctacaaatgataatttaatcatcttttcctcggcagactcaatggatcggtttcttcttcacttgggggttcttccagccccagcgcatatctcaatgaatagactatcatcaaaacatctttcgcgcaatcgtgaattgaattatgcatcacaaaaccatcaagcaaccctttccgaagaggacaggtcgaagcatcacgcgttaacaggcggttttcgatacatgtacgcacatcgcgactattccagaacacggtcggcatatcttcgaagatgtcgatcttgccaaccatcttacgcacgatatcaaccaggataccgcgatcgaattcagggccacgaacataatcgagtgattgccaacggctcacaccgtccgcttttaggtcttcaaagaattgtcgatgtcctgcatagagttccagatcttccggcgacggtttcaggatttgacgggcttcttcgctttgctgtttccaccaggcaattgttccctgatcagcaatacgatcaggctggttacgcaaatcaaatttgtactttcgtccccgtgcaaccagttccgcgaacgttggcgggttgtgtggatcatcaacaaacggaacgtatgagagttcgatcaccttcccgttcggggaagggccaaccgtttcataatcccatacgtaatctacgggtaaatgactcatgccgtcctctgcttgatatattccataaaacaagccagcgccagcgcaacttctgggttgatgtcgatggtttcaaactctttgctttgcaaagtcatcataccgaactgacgcagaccggaattgtagatcgccttttccagacgggtagcatgatctacagcatcgaaaaattcatacagaatatcataatcaatgtgtaaagggatctcgattctgggtatcttcgaaatcaggtcagcaattgcttccgcgtggaggcgagggatctggatagatatatcttttttcatgatattagtgtccatatgtctttatcttcacgaatgtttcgtgccattcgaaggatcagcacgataacgccatattcatcataagtcagttcaatttcttttgcaataggagaccatgaataacttggcccgttcggagaatacagaacatcgttagatttttcaatgaagcgcaaacggtgaataacttcttgcggatctgctgcgctatacatcccgaacatattgaacgcatgtgggtctttttctcgaattttatcgagtgcttccagaattcggggaatgtcttttacaaggatagtcaatttcataataacctcaaaaggggcaaagccccttatacataatcaacggtgtaacgtgcgcgggttactcccacatagattaactgcttacacagatcgtaatctgcgaacgcatacgcatcgcgcgtgtacatgtacgcatggtcatacgtgctcccctgcgatttgtggtacgtacaaaccggaagaggcttaacatcctggaacttgtttttaatcgcccagaacgaatgccacggggctttatagcctgtttgctgcttgatgcgcttataagtgctcgcaacgtaggccagatagttgcccagacggtctttcatcaccggatcaacaacaacttgaatctgtgcttcggtttcctcttcgagcgataccgttttcaggagatagaattcaagttcgatcttctcgtcgcacttctccgccttgataacttcccgacgcgggatgatttctaagactcggattttttcgttgttattatacacaatctcggtaaagatctgcccgttcaaccgcatttcctgaactaacggttcctgcatcacgatcacttcatcgagaatgaaaggttctgttgttttgtacaggtgtttgcggatcgttgcgttcagcttgtctacgttgtcgttagtgtaagcgaacatacggttctcgatcaagtcatccggtgttttaacacggcggaaatactgacggaggaagtcaaccgcgttagcatgttggaacacacctagatcaccgacagacatcggtttcagcatcttaccatcacgtacagcgcgtgaaacctgaataatcgggttcccttctgcctgacgcatgattttatccatacggataacatcaaagatttcttcatcaaagaacggggagagttcaacgcgtccatcggcgtttaccggacggatctgatctttatcacccagtcccagaataacagcgttgcttggaatactgcgccggatgattcggaacagatccatatcaaccattgagacttcttcaacaacgaacacgcgacaggtagacagatcaggcgctttctttcctttctgctgttcgaacacacgcagttcttcgttagtcacagggctaatcttcaatgcagaatgaatcgttgttgcgtccattccggtagccgctgctaacacgtttttagcctggtgtgttggggcagttaaccaaataccgctaatccccaaccctttcagagtgttaaagacaaacttaaccagtgttgttttaccaacaccagggccacccgtaatagttgtatgaatggcgttctggatgttgtggatcacgcgatcatgcgcggacttctgatcgtcgctcagatcatcaaatgttaactcgctcataatttgagtaataccccttgaattttcgaattctcaataaaccaacgcatctcttttttctgttcttcggttgctggtagttgctcggttttgcggaagaaactgaaacgcggttcgtccggcgtgtagttcagtttggtttcgtagcacttgcggataaaatctaatttatcttttgcaagttgtggtgatgcaaacagttccggcgttttcccgttttcaacgtatggaatagtaaagccgtctttgtctttcgtaacaatgatatagtatttgtcaatcattttcgcccctcatagatgacgtagaaaaaacctataacccatagcaatgataatactatcaaagcggcttttctgtcaacaccgttaacgtggaaaacgcaccatccgaagagatacgttatcaccgcgcaaacgatataagacaaagcaaatacggcatgtagcgcggtgagttccattagtagttgttagcccaacgacgcaggttttctgcctgtttcagagcatacagcttgtagatggtttccgcatccagtcccagcgcgaggaacttgcacatgaagaagtgccactggtcaatcagttcaaacaggatttccagcttgtcttcttctttcatttctgcgaatacctgattgcgcagttcctggtgatttgctttccacggtttccagacaccggaagcaggttttgcaccgcgtgacataccacccagagcggtgtaaagttcgcgggtttcgtctgcgatcgcatcatcttgcagtttcagccagtccaggatctcaccacaggtttttagattatctggacgaggaacccaattcagggtatcagacaggctttgctgtgcatggttttgcaagtccagcatcttttgcagcgggtcgatgccgttctgtaatgcattgcggtagaaaccttctaccatttccagatcagcagggttaaccaggtgcgcacatgatgtaaaagtgtttttatcagtcatatcaatctcattttttcggtgatttgttccacgacttaaaccgaagtttcgccgtgagtccagaaacagtattatctttcaaatactgcatgatttcaagtttagttgcgccgtcagtttttatcatttcgttgatatcttttgacggccacgggcatttgtcccacaacacaaccttttcgccagcctcaatcaattttaaaaggcggtgagtagtatcagggtgtctcgcttcattgtcaagaacccagacacgcatatttttatacggaacgtcagacaatgccatttgtccgcccgtaatcgccccagcattatctacaaacaggctatccagcggcccttcaagcaggtagacaggtttcaacggatcgatggtatcttgaccatacactttcgttgagtgttcacatgctttgattgtcatgtattttgcgttggcattctcacgcaaggcgcgtccctggaatgactcgattttacccttttcatcaaagatagggatcaccaaacgtggttcatccttcggtaaagggtatgcgtccgcattcacagaattaaccaggtgttgccattgacgcgtaaaccagaggcgatcatatttgtctttaggtatgtgacgacctgcaacatacttaacgatagggtgattttctggcaacgtgtccagacgttcgcagaactgcaattcaggaatatatttcttttcttccttcggcggttcttcgtgtgtctgttttaaatctttacgatccttgaaagattccatcaaatacgccgtgtaatcatccgggtaatagtctttcagaaacacagaaaacggcttgctgtagttgcagttaaaacaaccacacatcatgtgtgtgcctcgttttgacgggaatatccagaaacgttttttgtgcttatccttcatggagtcgccacaaatcggacaacgggaatggatactgaattccccaccccgtcgaacgatttcgctttgtggtaatgatcccatgatacgagttgcgaactctatatcaagatacatgtttacctctatcggctaacttctttctctgtgccgtctaaagtgattttccattcatagaatatcttataaaacggataaggtctaggaatatcaacacccgatgatgtttttctttcgttcgtgtacacgatcgctgtgtcgctcatgtacttgatacggataggaaaccaggtgtaattgttcgcagtaacccagatccgataattcagaggcggtaatggtttcattcttcactcttcatgattttacgtttgcgtttatgcggacgcgtagaacccagaaccttcggccctttgttcgtgatcgcgcctgtagtcacacccgaagcaatattatccacgcttccgcctgaatcacctgcaaccatttcttcgttgagtctttcgcgaagttctgggaggttcatcatgatctcttcgtgctcttgctcggtcaggttccagcggttccgtaacgagtcatacgcgctcgtaaggttcatgaacccagacatataaggaaccgcgtttaaacggcgcttgatgtgccttacagagcgatggaatggggaatatgcttccagttcttccttcgtcttcgggttcttgattacttccccttgaccgtcgatgatacccagcttgtaagccgtccattcagtccagggctttttcagtaggcgaatcattcgcacactgtaggttaaatccatgtttttgattaattgatcgctcatagtctttactctattgtgaaagtgaaaaggttttgcgcgggttctggctccggttcggggaattccatacagacaacttcacacatcggtttcacgcctttccattcttccagataatatccggtatcaatgccgcaacccggttgcatttcaaggccagtttcatcaagaaactttttgcatttcgatgttgtcgttgattcgtcctgttggaaataacgccgtccagaataacggaaattcgcggacatctgcgggagaatgaacgtacccgcacgggcaatctgtgaagcacgttcaatcactttatattcaaattccgcgcccgtatacttacccttaaaatcggatgtctttatcttgccgaaaggtggattgctgatcgccatatcaaacagagtatcaaactccgtcgttaacgcgtctgcgttaatccaggtcgcttccggtacgatacgcttacccaacttatagtatgtatggtttaactcgacacagacgatttcacgcggtttggcgtacatcatatgaagcatcgcgaacgatagcccaccaatacccgcacacaggtcaacaacgcttccactggtacaagcatcaatagtgaaatcgcgagcaagtccgatcggggtaaagaacgcgcccagttcagagttattcgtaaatgcaccttcatggaagttttcgataatgaataacttttcgtcgtaggttagcgccttgtcagactccaccagatccattatcttgttgtgttgtttggtttccgctttcgttaacttcgccattggctttttccggtaataagaacagaggggtagattctaccacatcaaagccccaatcatcaacaatattgctttcccagtcgcgggtttcccacgggctgcaaatccacttatacaccccagcaggatcttcaacctgttcaggcatacccaacacttccgcattgataccttcgtccagatagccaggatgaatattaggccagcgcatgatatcaacatagcctttgtcgtcaaccgatacgatccattctgaacgatacgggctttcgaactccggttcttcgtctggaagaatcatatctaataaatcactcatttcactaacccttctttaacgccctctttcatggctttcagaacaccgataaaagcgtctttgccaccgatagcgccgatgataagcatcaggacaccaacacaacccgctaaaccgattctgaacaggttccaggcaaacgggatagccagaagcaccaaccacgggaacggaaagcccataagtgcgtttagaaccagtaagataaaagcgattgcaagtttcatgatgtcctcctttgtttgtttagaataaggtatcacctttcgagaaggattgcaatacctatagatacaaaaaagcccctttcggggcttaatttttatgctttgttgataagataccgaagaacgtttttggcctgaacttcgttacagcagagtttgaattctgggtcgattgggaggaagccccagaggaaatcaacactaccttcaacatctgctttcccacttttcagcatttcaaccagcaaacctctgtttactacgctgttcactactgcatcgaaataacccgcgctgaaatccagttctgggttcatcacttcgtcgtatgggttgttcagtacgttcatttggtatctcctaatcagtttttgttgtctacgggagtcatattatcacaatcataactcccgtcaacccataatcaggattattttgcgttttttgcaatccagagagtcagtttagggaatacatttgccattgccaccacaaacagcacccagaaagccagcttaaccacaccgatcacgatcagaggcgcaaatacaagccaccaggaagcatttgccataaccccgattgctgccagtttcagagacaggagaatcaggaatacaataacgagaatctttttcatttcactatacctttgattggggccgaagccccgttaaaattgaatgtctgtactatttgcaatttcggctaacttattgcttcggttagtctcagcttgttttaccatagcaccttgtgcttcttcaacagttttcggcatctgacgacctttataatcagatttgaacccgatatcgctgttgtcggtatccatccagcgttgattacccttacgcacttcgagtttgaagtggttaaagtggttcttatcgccgtaacgggatttgatctgcttgaacaactgcaagccctgatcagctaactcgtcagtctcgatcacagctaacataaagtcagcggtagccggaagaccagcagattcggcaacgtcgcccatgctgatatcagaagcatcccacgcggcgcgggtagtctgcgcaccagtccacattacagtatttgtttcaacagccaaaccacgaagttcttcggcaatcgctttaaccaggatgtatgtattttccgccccgcgtacacgggtagaagcacagatccccaggtagtcaacaataatcacatcaggtacgaaacccttcttcaatttaagctctttaatcagcgctttaaagtggttagcgttcgcccctgctgttgggtattgcttaacgattaaacgcccgaccttcgactgtttgaggcgttccatacggttcttatagtccgcataggtgatgttcccgttgtcgatatcgtccagtggcacatcaagcaggttagcgtcaatacgtttagaacaaacgtgttcagccatttccatactgatatacaggacgtttttacctgattgcaggtaatcagcagcgagagaacaaagccccagagatttaccaacgttaacaccagccattaagatgttcaatgttccacgttctgcgccgcctttagtaatggcgttcaggatcgggatattgaaagcaatcttcatcgctttggactggtaaagcatccagcgtttttcatagtcttcgaagtaatcatgaccgaccgaactatcgaagctaatcgctaacgcttccgccatgatgtcagggattgccccaacgtcagggattttgttgttgcgttcgccagcaggtttttcagcattcgcctggatctcaattgcacgggacagagcgcgatacattgccttgtcacgacaataggtttccgtttctttcatcaaccattccagatcttccggcgcatttttcatgctgcggatcatctttttggtatcttcgtagactacatcactcaggctctttttgtccagagctacttctaaagcagtttgtgaaggaatgctgttgaattcctgtacgtgcttatccatcaaatcaaagagaatctgcgcgttcccttcgaaatattcacggcgtaaatggggccacgcctgaacaaaatacgtaccattaaaaaccagatttgaaaatattgtttcgacgatcattattacctcttaaaccagattagcgaacatctgaaagaaattatacagctttactttcaacgccgcccataaggtcttttcaggctttgggagattgggcttgatctgcgcgtagattgcatcgtgaaccagcggaatcagtttttctttgtcttcgtccggcgtactaaattcgactttcaggccgttatcccaatacaccttatggatgtacactaagtgtgcaacatcgttttcatcgttgatcaacagttcttgaataacatcctgcattgcttcatcaagaatgttttttgttttttgttcaatgtccatgattcacctattaaaagggggcaaagcccccagttgtttattactcttctgacatatccacatcatcagggatatcgtcatcgagatcaaatttatttgacggttctacttcatcgtcagaataaagatcttcgagtgctgccccgtcagtgatctctttgtcaggaatacggtacttatcctgaatagcatcaaggaatggttggtgagtgaacagaggtttccagaactcaatagagttggtttccgattcacgccatttcttttcttccagttcaagttcgcccgtttccgtgttcaggaacgcacgaccgcgccagcctttcgttggagtctgaacgaagttcatttccatagccagatccagaagaccagagaacatactgataccgccctcataggtaacatgaagcgggaatttggatttctctttcacgaaacgagatttctcgatgttcatgatgaagtcataaccgacaacttccgtaccttctttcacctgctgtttgcccaggatgatcgcggtatctgcggaatacatcagaccagtaccaccggaaatgactttcttgctgtacatttcttgtgtgtcgtatgtgtgacagatacacaccattggaatatccagatccgccaggtaaggcgtaaccatacggaacatacctttaagtgctttagcgcgggtcatgtcctgtttgtcgttgtcagacagggcatcagccagttcttttttactcgcggtgttgcctacagagtccacgaaaatgatcactttgtcgccacgttccagcgcgttaagctggctcacaacgtcatttcgaagttgctcaactgtcgtgatacgagtatacaccacacgatcggggtcaacgcccattgatttcaggtaagacttagttacgcctttctctgaatcgtagaacagacacacagcatcctcattcgctttgaggtacgccgcaaccgtcaccagccccagattcgatttaaagtgttttgacggaccagcaaacagagttaagccggaagtcagaccaccatcgaaagcgccggacagcgccaggttcaggatcggtacacgggttcgagttttggtgatgttattgaaaacatcgctttcagacagaattgatgcagattgactattcgagtttttgatcagttttttcaggagtgctttattagacatttatttttccggtttatatacacgcataatattttcctcacaaatttatataaatggggcatttctgccccgtcaggtcttaccagtcatcaccgaacagagtgttcagggatgcgcgtttttcgtaatcaattttacatgcttccgtgatgttttgcaacgggctaatcacatgtttttcaaataatccgccgtagtctacccacttcaaaatatcttcttcgatctcagttggtaaacgcgtaccggattgccatgcgatacaatcagcttgccacgggtttttatctcgcaacggcagaaccatcaccttttcaccttccatgatcggggtgattccttgaatacccttcgtatggcggttaaagaacagaacgcctttgatgtggtttggcgtccctttgattgggaagccagcaccatcattatattttgagatattattagcagatgatacaccagctatttcgcggtagtcaagcgccttatactcttcttcaaatactttgaagtgttcgtgtaaggattcttcaccttcttgcaggatgcgacggatcgcttctttcaagaactttttaaccgctgtcggtgtactacttcgctgggtttccattcccatgatctttaatttaggtttctcgtagcgggttccttcggagtcccatacgttagccgcatatcgtttcttagccgtccagaaactacccagacctttcgatcccagaggtggtccagaaatgatttcgcgatccataaacatcaggtgttcgacgttgttcatgtaatcacacagttcgcggtagcccttatcaatgataggttccatgcgttctttactgaacttatccaggaagtcaacccaatggttgttatccctgaacttactttcaccgccgactttcgcgatcacgttatccatacaaacataaatggagtcagtgtcacagtaacgcacgtatgcgtaatccgtggtgttgcacagttcgttaaggtattcgttaaccttacgctcaatccactgaatagccaactgcccgaacatggtgatcgcgctggcgtttcgaatatcgaagtaacggaaatgttcgttacccaacgcaccataaagggagttgatactgattttacggttaagctgtgcggtgttcgcctgtgcgattttcttctcacacactttcttcacggctttaagcatttgcttagacagagttttcagtacagcttttgattcatcaccgaaatcttcgtagaactcgaaatcagggttgatcatttggttgtgcgcgtctgtcaggtgttcgagttcgtgcttaatcagttcgagatttcgctcacccgccatcattcgttttttccacgtcttacgctgatcaaatactttcttgatctcgaccggaatcacgcctttaacatcgcgtcggaacatccacccgttaggagagcagctaaattcgtcgctaggacgcggcgcagtcttattgatgtattcatgcatcggacgcactgcaaagctgttagcgattgtctcagggcttatattcacctgtcggatgatagacggatacagactggttaagtcgaacgatacaatgtaacggtatggagcgacaaccggatctttaacgtatgcaccatcatacggcgttttagtatggcgtttgttttctgggattactttcttctcttcacgcagagagttgtaaatgattgcgtcccacgttttaagcggtgacataaccccagggaagttgattttcgcgtagtatgctacagacagaaccagttcgataaagttgcgtttaccgtcgatatccaacacgcggataacgtcaacgatgttatacgtgatgtatttctggtgatccgcttgacgcagttcagacagcgaaccttcgtaatcaactttgcttttacctgtttcgaactcagcgatcgcgcccagagcgtaagttggttgcggggtgaaactgaatttcttatagagatccattccatccatttgagcaacgccgtaaatctcatagcccagttgttcgttcccgtgatggtcggttgttgtcttcgcagtcactttcccgaacgggctgaaatgacgaacaacgttttgcccgaagatattcaggtaacgggtgatgatatacgcgatatcgaacttgtttgagttccagcctgtaacaataacaggtgtccgctctttccagtctttgatataagccgacatcagcgacttttcggtctggaatgaacggtaaacaattttcttcaaatcttcttcgctgatctcgttttcggtatcaacttttgacgctacccactcgtctaaaccaccctcgacaagatcgtacacaaagaatttatcttcaacgctgtcataatgggtgattgcgtcgatagcatattttgcttcgcgtggatcagggaattcaggcgcggtaacttcgatatcaagtgaagcaatgcggatcttttcgcgatcgtattcgatttcctttctgtaggcatcggagatatacgccagcctgaaatcatccatgcctagcgcttccatgcctacatctttcattcgctgcatccagttttttgcttctttaatgctttcgaagttctttttgatgcaggtcttgccgtaaatgtcgcgatatggcgagtctacacccgccatagcgtgttgaaacattgtaggcgcatattttgttttgcgaacctgttcgcgtcccccagagtcaatgaagcgctcgtagatgtgatcgcccatttgctcaacggatagataaaattcattcattacggttttctttctccgtgtttaatcgtgacaggaatgataccccagccagcttgatcagatcaagcgagcgttgcgctaatttgtgatagcgttgggtgtcaggccgatttagttgttcaaccagcacggtatattcttccatgatgcgggtatagaacttagggaagtgatcccgcgcgtatgcgtaggtgcgcagatcagagagattgcaagtaagagacagtttgatgtcttcgctatgcagacggttgatcaagtgatcaccggattcaatagctttgatgatttcttcaatacgaattttcataatttagtcctcacaagtggtgtacaaccaatataacaaagcccctgcatttctgcaagggcttttgattaatgtccgatccggtacttgtatttcaaagtccattcagctttttgtgcgtgagtcaatacgcggaagttgttctcttcggagaatttcagatccggcgtaaggatggaaaccataccccactcttccagaagtcgcgcaatgttattgcggcgcagttcgtcatcttcggtcatgtcaacctggcgaccgtccagcttcaacagttctttgaagtgtacgataaaataacgcccttgtttctgtaggatgtggcaagactgccacagcattttctttttgttatttgcgatcccgatacgggtcagcgtttcgcgaattttcaggaaactgtcatcgctggacagtttaatttcgagcatgttcatacatcaccatttctttattagttgttcaacctttttctggtcggttttatttttcacaacatcagccaacacagataaagcaactttcatatttttccgcttccactcgtccagtttttcaagctgtttgagttcttcgtaatattccattgctatacgtgtatttacaccgtatcgtttttggagaacatgaaggataactttcatttcgttatcttcggtgagtttagcccacgccccgaaccgcttacctttgcgcaccgtatgcaggtaataatcaaagtgcgcctggtctggtaaaccggaaccgatcatattcatcgtgtatgcagggatcagcgtttcgatatgctggctcattgcattgtcgatgaaaaacttatcgtatgaatcaagggcagagatccgtaatggtgtcttcccgttgttcagttcttcgagcaccataaacaaggtgttttccttgtctttggtgtactctttcacaagttcttcgatcttgtcccagtctttagaacgccaggccgcttcatgttcgttcagttcttcttcatcgagaaaagcagccagtgacatttttaagcctcccacgcgagggtaagcattaagcccatgaacaggtattgcaggtgaatttctttgttcaccgccagcccgtactgtgcgttgttttcgcctactgcctgaatcagtgcaaccttcgattcgttggtgacgatcgggtatacagcatccagcagtttagccaggaacgtttcatactcaggcgcgtacttgattgcttcggctcgcagtgctttgaagttcttcgctttaagcccctcaatcgctggtgtgatgtccgaaccaacaatctcagacagaataccagcatcaattttgccacgcttagaatagaacccaagagctttaacgatggatcgcgcgtctgggtagtgcttcttaacgaatccggcgatcacctgctggtcatattcgattttctcgatttcgaggataccgaaacagcgtttgatcatttgcttcatcagttcaacgcgttcttccttcgacggggaaccgaacttgactaccggacaacgggagatcagcgcagggtgaatcccgttgatgttgttcgcggtgatgataacagtaacgttcttgctatacgcttcgataaagctacgcatgtgcttctgtgcttctgccatgccagggcgatcgaattcgtcaatcagaatgattttaccgcctttcttctgcgtcatagaggacgcgtaacgatccagttcgttacggatgaagttcacaccacaatcggaaccgttgacaaacatcacttccgcatcaacttcgttagccagaaccagcgccagcgttgttttacccgtacctggggaatcagaaaccagagtcatgttgtcaatgcgtccagacttgatgaagccgcacatcgtcgctttatcagcagcagggagaatacattcatcgatcgtcgtcgggcgatagcgctgatcccatgcgaattcttcgggagactgggagattttgccgtatttggtttcgattaactgtacgttttcactaagttccataatattaccttcaattgattatcaaaaaggggcttaacgccccttgtgtactgctttgtttatcttacttgaactggctggttgcttcaagtaccactacatacgcaacgccgttttcggacgagaatttcgcagcgccgcgagaagagatttcaactttgtaatcgctgttgatgaactgcatgttgtcaatcttcatatcgaagttgaacatgttatcaccttcgtaatcgcccacttctacagagaaggttgactggctttctttacttttcgcggtgattaccagcttgccgttgattggctcaacagacaggtcggtcagtttcatcatgcgtgacgctttgatcagtttttcgaaatcgttcgcgctaatctggaaaatcagatccgcaactggcattttcagacgcttcttaggctgtacgattgtggttggatcgcttgaacgctcaacgattttcattttctcaccacggatgacgatttcgccagtggacagatcgtgagttacttcggcatcagtgcctacaacgttcagcatgttcaggaatgagttcagatcgtagatacctacatcttcgtcaattacgtcagaaatcgttgcttctgcgtaaactacgctgttaatggatttcgtcataatgaacgaaccctttttcagcattacagacgggttgatctgggagaagtttttcaggatgtcgatcgtttgtttagagaatttcatattcaacctatagttttcaattaggcaaaagtgccgttaatcagggattctacaacgcgatccgccgcattgtcaaggaattctttgcttttggattctgtgattttcgtacccgcttcgcgagcgtcgtgaatcagtccggtatgtactgcgcttactgcttcgtcgatccgtttgtaatgctcaaagcgttcagcttgaggcatcgcacggaaaatctctttgatgttttccggcactttacctacccaggatttgcgaacgttgttcagatgcgctacatatacgttttgttctaaattcatatctacctcaaactttcaaaattgggggctttcgcccccgtaagcattacagatccagcagtttatccaggtcgtcatcaccggaaccaccttccaggtcaaacggaggtgtattatcatcttccggtacgcttccgcctacgttcagttgacttacgccaccagattctttagcaccgttggaatggttgccattatcgaagtttttcagttcgttgtcaaatgagttcagttctgaatccagatccgcaccagcgcttgcgccagcacccattgcagcaccaccgaatactttggtgaacttcgcggtcagttccgcagttggtttgaactggtctggggcagtgattggacgcagatcgctcataccttcgaagatttctttctgacgcgcttcgtcttcgatgcctttgattgggccaggaacaccaaatttgctgtcgtcgtagttaggccagtcgcctactttcttcgcggtcagggtgaagttagcgccaccaaacggacaggttacagcaacacctggttcatccagatctgggttccccgcgatagccgcagtgattttatccatgatctttttaccgaagcggaacttaaacaccttaccttcgttttctgggtgcattggatctttaaccaccaaaatgttcgcccagaacgattgtttacgtccgatcatacccagtgttttttcggcttcgctgcctttcactttcgctttttcgaacagatcgttttcagagatatactgacacacagggcaagcatcgtaatcgccgtgggtagacgggcagttttcgatgaaccactggttattctttttgaatgaatggttgacgatacgcacgaacgccagttcatcataagatcggttaggcaggaagcggatcaccgcagaaccgtttttctgtgcatcgacaccgagtttccactctttttcatctttctggaagccggatgaacctttcagagcggcgacttgttcttgcagtttggttggatcttgacgtttaaagaatgacatatgttatttctcgtttaagttaattaaagtttgtttcattaagtttcggtattttacgatttcttcgttactgatttcaactaattttctgtatgcgtttagttttttactaaattcattccagacgaaatccgttgcgatttcatcgtgtttatttatgatgtctaaaaacgagtcgaggatcaagaatgattcataagaaatcaccccagactgtacgagtttgctgatatacgaggttgatgatttgacgctatactgaaacaccgttgagaggggaatacctttcatgcgggaaaattcatacaggttttttacatcgtccacgaaaatattatcaattcgcctcaacttgcctatgtattgacgataaaacacgatcgtatcttcgtctacatccccgacccagaagtcggggttagctaccatgttggagagaagtataagatatatttctttgaatgtaaacctttcggctaactttttgaaaaaatacttatctcttctcttttcgaacgctttttcagtgatctttatttcccatttgtacttgatcgcgtcatacttcccagcaaagtgatttttcatcaccagatatagtttgtataccgcgatcggtttcaaacgggaattagcgtctgaactgtcaaacggggttttaaatttcacatgaaatcatccagtgtttgcgtcgtcgcgtggtctttagccacagaaggacgcagcagattgtttttaatggcttcgtcgctaatcttgtcgatgatcgctttcggtacggttttggacagcatagcataatcaatgctgttttcgtccatccattgtaacgtagcttccatgtaggttgccccctcagaggcaaccagattttcgatatacaagccgacttcggttttgtttccgatttcgctcatattacgccttatcgatcacatcgtacagttcgataagttcgttgttctgttcttcgaacgcggtacgtgcctgttcgtggtacagtttgaacagcttgccgaaggttttaccgtcgataccataatccgttttcgctttggatttgatgtctttgaaagaaccctggaagtgttcgatctgggttttcacgtttgacgcttctttgatcagttctttaaccgctttagcgatgtctgggttttcttgcagtaattctacactcattttgttacctcaaaagtcacttagtttttcatacatacgggtgagtttgcattccatgaagtatttctccatttttgctttgttcccgatttttggagcattgtacgcttcttcgattgccgttgcaacatctttcggaataaaatcaaagtcgcgaagttcttcgttttctctgtagcggatcgcccattcttcgggcatacccacggtcggatcgtccgcttccagccaggcttcgagttcggcagcgtaaattgacggtgcgcgttctccttcaaccttcgtaacaatatagtcatttctgatcttaatgcaagcgatactatcttttttatcacctttaatgatcttcatgcgcaaatcgttacgcggggaaccatatttcggtgtaacccatttcttttgtgttggcgaccattgacgcacaccctgatatttttgaagggctgcaaagtcaccatcagcagaaacgatcagaacacgtttaccttcggataccgctttacgcgtcaccacaccgatcacatcatcggcttctgcgaagtcaacgcggatacctttgtacggtagattagcacggatttcatcgtatgtcgggtgaaggaaaccattcaggcgatcccagtcccaatccgatgcttcttgttccatttttcgtttctttttgtagtaccaggctttacttctgcgccaatacttgttatcatcaaaggctagaacaatttcagggtactcacctttgaatttaaccacattgtgacgaatggtgtcaagcactatgtgacgaacaatttgttggttgatgtcattctggtctttcggcttgaagttgttcatcaacgttgctaccgaaaggtttgaaatatctatacacatcacatcaacaggatcatcgtcattgctcattaagctgttcaggttgaacatacttgcaaatgaagacatttcaatacctcgttgttgttgaatgaaactgattatagtgatcactttttcaaagtcaatagatcatttcaaaaatctgagcgaagcgaaggacacgaacgtagtgagtgtctatgtactgaatgtacgttttaatatttttatattttatatatagagaaaacagtacatttccgtatactttttaaccagttttaactatccgtttcgcttcgctcacggaagcgcttcgcgctgattttattaaataatatagattggaagtaggtttgaaacacctgattcaatcggctacaatgaatgtattcaatttggagaatataatgactacaaagatttatgcagataatgataagctgtatccagttatgtgtaagtggaaacagcaaatccgtgaaactggtgatcgtaagatgccggatgaactcggtattgcgattatgaacattgctcacggtttggcacgtcgatacaacttcaaccgttattccgaagactggaaaatggatatgatcgatgatggaatttcggcaacgatttccggccttcataactttgacgaaaccaaatatacaaacgtctacggttacatcaacaaggcttgctggcaagcgtttgtaactcgtattctctacgagaagaaagagaacgcgaagaaatacaaatacttcctggaacatgtctatgacagcgatgatactgatatgaccacgatagccgatgaaactttcattcaggatatccatgacaaacttaatcagtatgaagagtccgcgaaaaaacccaaagataaaatcgaggttgtggacgaatcgccaacattggaaatgtttctatgaaaattaaaattgacctgaacaaaattttagcagatgctaacgacgaaattgatctgcttccttaccttgtgaaattagagttgcagagcttagggattccgattatcatcgaccctacagatgtacgagatccagacttccagataacagaaggtcgtctggactatgtaataaacgccgaaacaatgatcatggagatcacttactatgaacgtgcagcatgaagtaatcgacgaagtacaccaaaaatcagcgctggatcttcgtgaagaagaactggactccatcaagggtacacgcattgaacaggaagccctacgcaaagcacaaaagttcatgcggaagaacaaagcggaatggaagcgactgcataaacacgcagagaacgcactcttcgaaggtaacaaagagcagtacgtatacgcgatcaaaaagatgcgtgatatgctcaagcaaccatacaacgatgaactgattgaaacgatgtggatcacttcgaaccaacagttgaaagacctgttcatcatggcttctgaaaaatacggcaaataaaccccttcgggggttttgaggtttatatgaactatgttttaattggggatacccatgccggacttcgccaggataacccctggaacgaagaaaacctgtatgcggtattcaaacagatcgtagagtattgcaaagaacacgggatcacgcgcggcttccatgctggcgacttcttcgacgttcgaaaagcaacaacacaaacgacaatgaattttgttcgtgaaaagctggttcctcttctgattgaggcggggatcactctggatgttcttgtcggcaaccacgattgccaatttaaggacaaaatacgccccaacgcgccacgcgagatactaagtcaatacgaatgctttaatgtcatcgacgaaccgaccacggttgatttaggtggcggaaattcgattgacctgatcccgtggatttgtcaggaaaacagccagcgtatttttgactacatcaaacaatcgaaagctaacttttgcttgggacacttcgaactgtctggttactatttctacaagaacagcaaagccgatcatgggctggaacctgatttcttgaagaagtacgatcgtgtttactctggacactatcaccacgctaacgaaggtgacaacgtgttttacatcggtacgcctctgactatgagcgcgaacgacgaagacgaaacacgcggattctatgtgttcacgggcaagcctgaattgactttcatcgctaaccctgtgtgtcaccatcgccggatcatgtatccagcacagaaagatgttgatctcgaacaattccgcaactgcgcggtgcgtcttattgttagcgaaattgatcaggggcttgcaaagttccaaaccaaaattgaagaaattgcctatgaaatcaacatcatagacaaagttcaaacagattcggatgtagataccgactttgaaataaaaaccgttcgtggccttatcactgagtatatcgccaacatgcagatcaccgacgatgaaaaagaggaagtgaataagctgatcagcgaactctacgcggaggtgtcaagtgcatagccgttatgatgaatatttcggggcgaacccccgatattctcacctgttgcgtatgttgggaatgaaacacatcatttccacatccgacgaagcaggggaaaccagcgcagtttgtttgaccatcatgaagggtgcatggcattcatcaagaacatggtcaatcttcatgcttgatacactggaagatgatacgctatcatatagtattgattcatcagttgttcaaatgatcactgaattatgtgaacggattttaaatgaaactaaacttcaaaaaaattaagtatcaaaatattctgtcggtcgggaacaccccgatcgaactggaatttgatacggcaaagaaaaccctgatcacggggaaaaacggtggcggtaaatcgacactgatcgaggctttaacctatgccctgttcggtaagtcattccgcgatctaaaagtcgggcagttggtgaacagcgtcaacaaaaagaaatgcctggttgaactggaaatcgaatacgggaaagactcgtacaaagtggtgcgcggacaaaagccgaaggtattcgagatctggaagaacggcgagaagttgccggaagactccgcagcaggtgattatcaggcacagcttgaatctatgctgaacatcaaccttgtgggcttcaaacaggttatcgttctgggtacagcgggttacactccattcatggaactgaaaacccccgaacgccggaaactggttgaagatttgctgtctctgtccgtcatcagtgaaatggacaagttaaacaagtcatacattcgcggtgttaatcagcagttggatacactctcaatgcagggtaatcacatccagcagcagatcgcaacacaccagcgcttcattgacgaacagcgagcgaaagcaaaccagaacaatgcccgatacaaagagatctacgatagccacgtagaaaccgcaaagaacatcaaagcacagcttatgcagttgcaagcggagattgcggaatcggtgatcactggagaagaccggacggaagatatcaacaaactccgtgacggttattcgcggctctcaatgactgtagaacagtttaaaaagctggaggtgatgtatcagaaaggcggtgagtgtcctgcctgtaagcaagcgattaaacccactcctgagcgtatggcggagatcgcagagaacatcaaagcgggtacacaacgtttaaccctgatcaaaaccaaacaggacgagttacaagggatcatgaatgacttgctgcaacagcaacgcgcactcaatgccctgaaaaccaaatatgaagccctgaaaggtactctgcaaaacgaagttgccaacgctaaacgcgcacaggcgatcatggaacaggcaagcgcggaagtagtcattgatgaagaacccgtgaagcagttgcaacagcaggaagcagaactgaacgaaaaacgacaaggctacgtcaaggaaaaatatattcgtggtattgttacggatatgttgaaagattccggcgttaaagcgagtatcgttaagcgttatattccgtacttcaacaaacagatagcatattatctggatctgttgggtgctgattatcagttcactttagatgacgagttcaacgaatcgatcaaatcactggggcgcgatgatttcagttatgcgtcattcagtcaaggcgaacgcgctcgcatcaacttgtctattctgttcacatggcgtgacgtgacaagtaaagtatcaggcgtggatctgtctctgctgattctggacgaagtttttgataacgctcttgataaggaaggtgcgtttgctgtaggggctgttctgaatggcattgatggtaatatcatggtgattagccacaacgatttagaccctggtgatttcgatcgtcatatcgtcatggctaaattggggcgcttctcgaagatggaaatcaagaagtcttaaacttgcagttgtcaaaatgccatcgtttcatattggtggcatcaccaactttagcgcaatgggggcaagttaattgctcccttttcttttgtgtttttctgtcggggttctgggtacaatatggaatatgactgttcaagtaatgcactgtcgattctgtaccacaatgaggacaagaaccgcgctccgatactacgttgctgtttttatgcgctcgcatgactcctgcaaatgcattcactttcccttcattgcctggcttgtgcttgcagttgtcgaagtgccagcggttcatattacctactaagccggacgtattgcaatgaggacacgtaaccctgttctgttgaagtttggcctgtctcatgcgtaagcgtgtctcttcgctaaactctttctgtttctgggcttcaagtgctttctctttcaaccatccgtagcggcggtttgctgtacgcgcagacgatcgagaagtgccaactgtaagcatgttagcagcataaattagtttatggttgtctggatacatcttaaccaatagcaggtgtgctatgaagtgttgacgtgctgacagttcaaccagattttcgggatcgtccgatcctcccatacattttggaacgatgtgatgtttctctgtatactctgcatccgttccgatagtcatgagttgttcgtaaatcttatgataattcatgatgataacctgtgtttgatagtccgttagatacccctatttaggaacatgattatgatagaaagagaatttgaactgataacaagccccgaagtggagaggttttatctccataatgaattattggaagaaaaacatgtagttacaatggcagatgttgaggaagcattcaaagataaccccattgaattgacccgcatcaagaataataaatcttcggtgtggttcctcgaaaaaatctattgacagtaaaacataaataccttaaagtcgcccgtgtactgagttgcacgggtttttattttgaggaacggaaaatgattaacgaacaaatgtcacacagcgaagcattgaagattttgggcgctactggcgacgaatctaaagctgaactgtcaaagctctttaaacgtgcttctctgcgcaatcaccccgaccgtggtggtagcactgaactcatgcagaaaatcaaccaggcgtatgacgttgtaaccaaaacaaacagcgctggtaaaactttcagtgatgttcgcgcagaacacgcagcaaacaagaaagcgtgggaagaaaaatttgcagcgtatttcgtgctggcgaaaaactatttcagcactaaattcaacgcgcaagaatttgcggaatatttcacgaaattcaccggacaaccaacaacctatacccagacaatcagcgaagttcgcggtcacactgttcacgcaacctatcgtttcacttctggtgatgcgttctttgacttctctttctcttgtcaaccgcctaacggtcaaggtttagcagcgccggacgcgtccgcactgggtagcgtatcagttaatactctggttctggttggtacgaagaaacacaaaatggcaagccgcgattaccaatggggcaagaacccagacaaaatcacgccggaaagcctgttccctactaagaaactggaatccatctttagcccgactaagaaggatctcaagttcaaacgcgcggactacatgacatcctttgcccgtatcctgggtgcgaaggtaagcgggaatgatgttattgttgatgtcggacactatcaggttcacttctaccgtcacgtattcatgcgtaaaggtgcgtatgtgttccagtatgttgttgacccaactgtgaacaaattcaaacctgctgaacgtctgaaaggtactatgctggaagatgaagacggtgcatgtctggatatgatcatcgacactttcaaagaaatgcagaaagtaaaaccagacgcaagcggcatcgcagcggtaatcgaccggatgaacgcagagtttgcagcggggcatcgttcagcatcttttgttaaacgtaccgcacagcaagcagcagcgccggaaccagaacagaaaccgaaacgcaccgttaaccgcatcaataaagatgactatttcaacgcactgaaacaggcgggggcaacattccgcagtaactacggtgagtttgataacggcgcgggtttgactttccacttcaaacgcgagatcagcaaccgtaaaggtttctggagtttcagcagctttgatttcatgcactccggtcagaaacatgttgaatggttgaaagatatcgacattgacgaggatagcaaaggcgcaagtatcggtttgttggttgataccctgaaacaacttcgtggtgttgctgactggtacacagcccgtaagatcctggaaggtatgcgtgataacttcaaggctggtaaattctccgcacctcatgtgaagaaagaagccgaacagaaacgcactgaaacgcaagctaaggacgagttaggcgcacagcctacgaaaccacaggcagcgaagaaagaatccccagcggttgataaggcgcatcaggcacagatggatcgtgagaaatcacagatgaatgcaaccattcgttctatgctctctgccctggttaaagccggacgcaaagacacaccggaagaaatcaaaaaagcagttgatgaagcaatcgctctttggcgcttgaaacactaactggttatgctataatgggaactgttgaaaagcagttcccttttttatgaggtgagtatgattattcaggtatcggttcagggcaacactctgacagtaacaaattccattatgaccgctatggctgcatgtcgtgatcatgtgatgtcaaaccctccggtaacggaaattctggaaattgatgtatgggaagacggtgtgatcgaagaatcctttggtttcactccgttagaggaagatttacgcaaaatggaacaatggctatggcaaactgtaccccaatgaaactaccaaaacacacaaccctgttaacccgcgaaaaacttcattctgttgaatggagtccgttagatgtgatggtgttcgatctggaatccaaaatcattaacgcgcatgttaacggattgagtatcttttctgttgaatttgaaaagattcgcgggtataatgaagcctgtaaagacaaattgcgtgtcatggttgaagctatgggctacatcgtgactattgaagacaacaaaatgtggattgcgctatgagcaaagtaaaagcagttttcgccgttggtcatgatatgtacgaagtggactatgctttcggttatgaacagggtttgccgtggggccactgcaaagaggatttgcagaacttcaaagcagaaaccgcaaatagcgtcctgatcatgggtgcgaacacttttacttctctgcctggtaaattgccaggacgaattcactgcgttctgtctggttctggtagtttcctcaaaaccaaaaaaggcgatgttgctgattacgtcatccacggcggcgggttgtctgctgcaatcgacgtgatgaaagcaacgcatccagatcgtgatgtgtgtctcattggcggtaaggggttgcttctggaagcaatcaataatacactggttgatgaagtggttgtgacgcacatttacggacatcacactttcaatgcgccagcttttaaacgtgatgtttcattcacggttcctgaattctgtgaagcggttctgaaatatgaactgactgatttcaaaattcagcagatcgagtcaaacgaacgcgtcagaaaaattatcgtcgatcgacatacgaaaaaggcataaaatgaaacaatatcttgatatcgtcaacaccgttctaacacacggtactgaatcaaccgatcgtactggtgttggtacactgcgcatcttcgggatgcaagcacgttggaacctcgcagaaggtttcccagcgactaccagcaaacagctattcttcaaaccgtgtaagcatgaattacagtggttcctgtccggttctaccaacgtggaaacattgcgtaaaatgacgtggggtgaagatagcgataagcggacaatctgggacgataactacgaaaatcaggctaaagcactgggatatactcatggttatctggggccgatctacgggcatcaatggcgctcgttcggtgaggaaggttctttttatggtgttgaccagattgcaaaaatcatcgaacaactgaaaaccacaccagacgatcgcgggatcatcgtttctgcctggaacccgatggatctggatgatatggctttgcgtccgtgtcactgtttcttccagttcgtcgtaatcaacggtaaactgtctctacaatggtatcagcgttcagttgatgtcttcttagggttgccgttcaatatcgcctcctacgctctcctgacgcatattatcgctgatatttgcgggtatgaagtgggcgatctggtttggactggcggtgatgtccatatctacaaaaacgcagtagaacaagcgaaagagttgttgaagccggaacgcgcaccgcttccacttccgaccctttatatgccgaaggtaaatagcttacttgatttggatcaagaattctttgactccatccatttgaaagactataatcaccacggctcgctaaaagcagctatggcagtataaacaaagggggcgaaagcccctttcttaacaaggtaagataatgagtgatattaaaacagtagtgaagtcttctggcgtaagtcaaacgttcgaaaaagaaaaactgttcaaagtccttaattgggcgagtattggaagaaatattgatgttaacgcattccttgaaagtgtcgttgacctgcttcgtgatggtatgactaccaaacagatccaggctgtagcgatcaagtatgcagcggatcgaatctccgcaaaagaacctgactggcagtatgtagcggctaacctcgaaatgttcgcccttcgtaaaaccgtttacgggcagtttgacccgattccgttctacgaacacatcactaagctggttgaggctggaaaatacgataaagaaatcctgacaaaatggactccagcggagattgattatctggaatcgaaaatcaatcacgataaagattttgaattttcgtatgctggcgttcagcagttgatcgggaaatatctgttgcaggatcgcacgtccggcgacatctacgaaacaccacagtatgcattcatgctgatcgcgatgtgtctgcatcaggacgaaaaacacgctgataaaatcagtcatgttgttgacttctataacgcgatttcggatcgtaaactgtcattgcctacgcctattatggcgggtgtgcgtactcctacgcgtcagttctccagttgtgttgtaatcgaatcgggtgattctctgggttctctgaacgctgttacgtccgcgatcgtgaagtatatctctcaacgtgcgggtattggtgtcaacgccggacacattcgcgctatgggttcaaaaatccgtggtggtgaagcagtgcatacaggcgttatcccgttctggaaacacattcagacggcggttaaatcctgttcccagggtggtgttcgtggtggtgctgcaaccctgtattatccgatctggcatcttgaagttgaaaacctgctggttctgaaaaataaccgtggcgttgaagaaaaccgtattcgtcacctggattatggcgtacagcttaacgatttgatgtataagcgcttaatcaataacgattacatcactctgttcagtcctgacgttgcgaacgatcgcctgtatgacgcgttctatcaagcggatcagactgagtttgaagaactgtataccagtctggaaaaagacccaacggtacgcaagaaacgcatcaaagcggtagatctgttccagttgcttgttcaggaacgcgcacagaccggacgcaactacattttcaacagtcatcacgtaaaccagcagggtagtttctctgttcctgttcgtatgtcgaacctgtgctgtgaaatcgcgatcccaacttcaccactggatgacgatgataaactggctggcgaaattggactgtgtacgcttatggcgatcgttctcgataatgccgatataagcgaattcccagcccttacacgcatcgcagtacgcgcactggataacctgttggattaccagaactaccctgttgcggcggctctgaaagccaaacagcgtcgttctctgggcgttggtatcaccaactatgcatcctggctggcaagcaactattgcgactactccgaagcatacgccggaaacgttcatgagttgatggaagcgtttcaatttaacctgctggttgcctctatggaactcgcacaggaacgcggtgcatgtggactgttccacgaaacgaaatatgcacaagggctgttgcctattgactggtactgcaaaaacgttgatgaactggcatcacctgtgtataactgcgattgggaatggttacgcggtgaaatcaaaaaacatggcttgcgtaactcaacgctttctgctttaatgccttgtgaaagtagctcgcaggtaagtaactcaaccaacgggattgaacctccgcgcggccctgtgagtgtgaaatcttcgaaagaaggttcattcaatcaggtagtaccaaaccagaataatcagattgacttctatgattatctctggacaatggcgaaacgtggaaacaaaggttatctgtcgcacgtagcggttatgcagaagtttgtcgatcaagctatctctgcaaacaccaactatgatccggctaacttcccagatggtaaagtgaaatctgaaatcatccttgaagatctgctgtatgcaaactatttcggcatcaaaactctgtactaccacaacacccgcgacggtgcaggtgaggaagaagcggaagattgcgaaggttgcaaaatttgattcaatgccccttcgggggctttttataaggtaaatccatgttaactgtaatgaacacaaacccagatcacaaacacttagaacagcctatgttctttggtgaggatacgggcgtagcacgatacgaagaacagaaacaccgtgtattcgaaaccctgactgaaaaacaactgtcattcttctggcgaccggaagaagtggatctgtctatcgaccgtatgcagtacgcgaaaatgccggaacacgaaaaaatcattttcgattcaaacctgcaatatcaaaccctgctggataccattcaggggcgcggcccgaacctggcgttcctccctatcgcttccgatgtctctatggaaacgtggatcgaaacatgggcgttcagtgaaacaattcatagccgcagttatacgcacattcagcgcaacctacacatcgacccgtcgaaagagttcgataaaattctgcgcaacgaagcgatcatgaaacgttcggcttccatgacaaaatactacgatgatctgatcgcagaatgtcatgaactgaaaaatatcgtgctcaaaatcgaaatgttaacgtcccacggatacccagacgaatcgatcgcagagtacgagaagaaacgcaaagagcaaatgcgtaaatgcaaggttgctctgtatctgtgtatgcacgctgtcaatgctctggaagcgatccgcttctacgtgtcgtttaccttcacgttcaactttgccgaacaaggaaagatggaaggtaacgcgaagatcatgcgtctgattgcccgtgatgaagcacttcaccagaaaggcactcaaagcaagatccgactctggcagatgggtaaagatgacccagaaatggcggaaatcgcttaccagtacgaagaggaagcgacaaagattttcctggaagtatacgaacaggaaaaagaatgggctgaacacctgttctctatcggtgatgtagacggcgtatccctgaaaagtacgatcgcctatattgaacacctgacggatcagcgtatgcgcgcggttggcttgcagtctccgtttaaaccaacgccgaacccgtatccgtggatgaacaaatggttgaagtctgacaacgtacaggtagccccacaggaagtagaagtgagttcttatctggttggcaacctcaacaccgagatcagcgacgaagcctatgcaaaatggcgacaaaaatacgcttgattgtcgcgtcgtaaacaagtataaaggtagctgggatgtcgatattcaaagaggtacaaaattcggcaatcccttctacaagggaacacgggctgaaaatattatgaacttcatcccgtattttcaaaacttgattcgaactggcgtgatcacaatcgacgaactgaaagcattggacgggaagcggttaggatgtacatgcaaacctctaccgtgccacggtgattatattgctcactgcgtcaatgtgttgaccggaaaggtgaataagttggatatataatggacgatgtaacatttggtgtaatatttcctttgcgtctggattcagacaaaaggatagaccggagttttgttaaatgtggagaattccggcattgtgtgtattttattgaaatcgacggtcggatagtgtatgttggaaaatgtcgtgatttgtggaagcggttagacacataccgcaattcgaaatactggagggaagcaaaccccagtaatattttgaaaaccgcacgtctggaaatggcaatcaaaaaacgtaagcgtgtaaatcttatcgtgacaacacacgatgaagacacatatcatgattttgaaataaacatgatccgaaaaatcaatcctgaatggaacaaacagcactatgacaaagctaaccaaaaatcagaaaactctctttgatcagttgatgaaactgtgtaacgaaagcgaatgcttctacttcattgatcaaaaaactgtgatgcaaaccaacgtgcgcatctttaactatcgcatggcgagctattccgactggttaaaacctggtgcgctggaatgtcgcggtatcatgtttgcgatggatggggatacccccgtaaaactcgtcagtcgccctatggagaagtttttcaactatgccgaggtaaaggcatgggaagcactgaaatcctctcctgtgacgattggtgaaaccgtagtggatgtgatgattaaggaagatggttccctgatctccacattctgtgattccggctatctgggcgttaagtctaaagcatccgttcaatctgaacaggctatggacgctatgagcgtgatccagactaaccgcgcattgttcgatcgtctgaccgaacttgttaacgatggtttcaccgtcaacatggaatacgtcgcaccaacaaaccgtatcgtaattggctatcaggaaccagcagttgtgatcctgaacatccgtaataacgacacgggcgaatatgtcgattatcaggatatcttcgcagatggtgtattacgtccgttcctggttgagcgcgagaaaatcgaaatcaccgatctggatgcgttcattaccgaagcctacacgaaagaaggtttcgagggttacgtgatcaaaactgataaaggttttgtgaaagcgaaaaccaactggtatgtaaaccttcaccgcacgaaggatagcatcaacaataacaaagatctgttcttaaatattgttgaaaataccgtcgatgacctgaaacaaatgttcctcgatgatatgtacgcactcaagaaaattgacgcattcgaaacgttattccttgatagtctcaatcgtctgactgcaaaagcattccaggcaatcgaagacacgaaaggcaaatcacgcaaagactacgcgatcgccctgagcgctgacttaacccctgacggtcgtattatcttcgggcctatgatgcgttatttcgatgataccgataagcaaaagctggtcgataacatcgttgcattaatggcgaagaactacgaacagtttataccggaagaatataaatgacattaccagcctttccaaagttaacttctttggtgtggcctgtcattgtagccctgtctttggcagggcttttgtacatgacaatcacgctgaaaagtgaaaatgaccaattggctaaagatatcaaagagttacaggctgatatcaaaaaagtcaaagagacaaacaacaccaatacggtgatctatgtcgaacaaaaaggtaaggatcagcagttggtcaaggatgccggacgtaaagatctgctgtttaaaaaaccaggactgatcgaaatcaagatcaataagtccttcgaagagtatatggcggagtacgacaaatgaaaattgcaacgttagcccttgttctgggcgttctgttggttgggtgtgctgagaagcccccagaaaagattttgcctacactccccgctaaggtgaatccggtgaatgtgaaatggaaagtggttgcagaagtccgagagattgacggtaaaaaataccttgtcatgccttatgacggaaacccatacgttgccctttcatatcccgattcgttaatcttccgtagctggatgaatgacgttaagcgtcagaaagaccagacggataacattctgtgtaccgtgggataccctgagaaatgcaaaaaatcaaaataagaataaccgaagttgatttctttagtgacttaaccgttggaaaggtgtatgatgctacaaggatcaaagatcaactttggatctgtagtgattggtctattttcttagatttacacacttatgccaatcgagcactaattgaatatgagattgtgaaatgaatctgtttattactgtaggcgtaccaggtagcggaaaaactacatgggcgaaagaaaaagcgcgtcaactggggaacactctgactgtttcccgtgacgatatccgcaaaaccctttattgtgctggcggtgatctcactggctatcgcttcaccgaagagaaagaactgtttgtttgccgtgtgcaagaagatacagttcgtaatgccctggcgagtgggaagaacgttatcgttcacaatacccatttacaccaaaaagatcatgatgtgtggcgagagatcgcgaaagagttcaatgctgatttccatatcgaatggattgatgccgatatcgtagaactcctgaaacgcaaccataaacgcggtgtgaatgctctacctgtttcccgtgtctgggcgatgttcgaacagtaccgtaaactccgtggctgggttccggctatgagctatgcagatccgagcaaaccgaaatgcgttatcttcgacgttgacgggacattaaccaaagttggacaacgtagcccgtatgacttcacgaaggttatcaacgatccgcctaaccctcctgttcaagaactgttcaggatgtataaggccgctggttatgcctgtgttgttgtgtctgggcgtgagggtactgtacagtgcgcacatgataccgctgcaagcctgatcggatacgatgttgacttgagcgatggtatctacatgcgcgaagaaggtgatcatcgtcacgatttccacgtaaaagagcaaatacttgttgaaaagattctcgataattattatcctgttcttgcagtggacgacagggatacaccagtcgggatgtggcgaatgaacggtatcccgtgtttccaggttgattacggcgacttctaaaaaacagttgacagtgagtgcgggtgtgataagatacccgcacaaacaaaggagaatattatggttattcgtgaaaatgaaaatgtgatggttgaactgggtgatcgtgttaaagttgagaatcctgttgaacttcaactgaaactcaaccagttaggccagcgcattgctgataaaattcctgctggttatacagtgaagattgtccgcgatggtcagttctccttccttctgggtattttgagtcaacgtaacatcgttgaacaacagttcgggattcagtggaatccggtaactaaattcgtaacatgggcggcagtattatgagtgacaaaatcagaaagattcatcaggcatggttctgtactgaaccaacgatgcttcgttatggttgtgtgtttgggttggttgataacgatcctcaacaggacattgcaacaagtccggttgttgaatacgcaattccggcgaataaatcgtttgttgaagtggtgacacgttcaggtactacgtatcacatcgttaaccctgataacgatttcatcaaagacattctgaaatatatggatgaccgttaatgaaattcaaagtaatgaatatgttgagagcaatcgatcggagtcaacgttctcaatgtatttcgaatcgtgtaggtgctattatcgcgataggtggtcgtgccgtcgcgtggggcgaaaataatacggttgaccttgattgtcgttgcaactcatgcaacaatcatatggtgaatgatgacggtaaactgaaagcggttgatcgtcctgaacattcagcatggtcaaacgataacgaaattcatgcagaaatgaaagcgctattgagtgcgcacacaagaggtgttatactcaaagacgcagcactttacacaactgcatcgccttgccctaactgcgcgaaacatatcgaatggtatgttgctagcggggcgattacatcggtgtattatctcgataaatacgatcgtggtaatgatgaatggatttcacgcttgcagaaatatggctgtgtcgtggaacaaattaaacgggaagagttagaatcgtttatcgacttttccaaagtagtgtttaacaacaatgagtaaagaaatgtctgaactgaaagtaaaagcatccggcgaatatgtgatcatcgaagctactgcgcgtccgcagggttccgaaatcaaatctgaatctggtatcgtggttggtgtacgccagcacggggaacaacctttttatggtaaagttgtttctgtaggcgtagacgttccagcagaagcggcagaacgaatcctgggtaaatatatcccactgccaagcgctcacatggcgaatgttcctgaccctgatctggttgcgggttacatttccgaaaaagaagcaaaagagaaggaaacaaaatacgtttccgcacattacaaagcaatccaggcaatctacgagatctaaaaatggctaaatcaattcaagcaattatcgctgataccgtcagcaaatccaaaaagctgttcgacaaaggcgaaattctggaagccccagcgcgtattgacgtaatgacagcaatgatcattgatgcgcatcagggtaaacttaaatcccgtgccgatgaagtcatggcgtacatcgtccagttcgaagacgtatgtaagtacgcgaaagatgttgatccgctggttcgcgaaatctatcgcaaacagttctaaaaaatttgcaggtgtagttcaattggtagaatatctggtttccatccagattgttgagggttcgagtcccttcacctgctccaattcgggtgcgtagcgcaatgccgttaaatggttcggaatatgcaaccatatcccacgggataggctctgttggtatccggtaataggttccccggaatgcggggtgaagtaaagaaacttccagcccactaaacaatgtgagatctatatgagaattcgtgaaaagacggtgtatgactctaagttaggcaaaacaatccatacgttcaaagagattacgccagcgcaattcaaagagcggtacggcatgacattcaacgaatggaaagcggggttatgtaaaaatgactaccgatataaattaaaattccgtgaatgttatgttgatgacgatccttatgcagcagatgtatgtggtgaaattgcaccaattatcgagaattcgcccgacgcactaatacaatcttgcatagatgcagcatacgaaatttaaaagagaaaaatatgaaaggtcttcaaaagctgtttgaattaaccccgaaaattcgcgaaatcatcgcttcatcaaatgaacaggaaatcaacggtaaagtgatgaaactgtttaccgaggaaatcccagatttcgataacgaattccgtaaagcgttcgatgcgtattctgttgatggtttctttgcatcgccgcaggtgaatagcaagcgtgaacacagtcaccgtttattcgactggtcgatcgtgaatatcgttcgtcgaactgatattgaacctactaatcatcagttggtttctatggatgcttcggtattcttcatccagtatcttattactggtggatttaaagcagaaggtattccgttctgtaacgaagctctgtacgaagaattcgcagaagcgtataagtatatcaaagcagttcgttaatcaacaggctatcttcggatagccttttttctggagaagcacatgcgctttttaaaatacgcaagctggcttgtactggttccccttgatattctttctggtgttctggctattctgctggctcctttcgtggttccgttctacagtgaagaaaccggacacttacctaaagggttccgttggatggaaacattcgataacccgatcgatggtgatggtggacatatccggcgttgggctaacatccggtatcacttaggcgatctgggtgtgtatgcgcaacgtgtaggctggttgtggcgtaacaaggcgtacaacttcgcttatcacgtcttagggcgtgaagcacaatcagacttcgcctggaagggcaacccgaaaacagaaggtggttccgatccatcacgtcacggttatctgttgatgtggaatgattcggcatgggggctttatgtcttcaaaccgtggcttaaagtcggaaaggttcagttctgcttacgcgtgtattgcgggtggaaactgaaacaggaagtaactgaccctaacgggctggatcgtgcaatgctggcgttccatatcaacccgttacgttattatgtcgtagaaaggtaatacaatgaaagcatatcagattttagaaggtttacacactggtacaatctacctggaagaaggtaatgatgttcgtgtgttggtatccaaaaccctcgaaatggattcagtgatcggtaaagctcgcgttgctccattcgcaaaacgtgaagtcgatattgaatttcaacccactgttaaagtggaaggtggacaacacttaaacgtaaacgtgttgcgccgtgaaactctggaagacgctgtgaagcatccagaaaaatacccgcagttaacgatccgtgtgtccggctatgcagtgcgtttcaattcactgactcctgaacaacagcgcgacgttatcgcccgaacctttacagagagtatataatggcgattgaagacgtacagggctataagccccactcgaaagaaaagatcgacaaagtaaaccgcatcaaggccgctgaaattgccctgggcgaaatcttcaaagaactggatgaagagtattcaagcgattacgcggtatcagataccgattcattcaccacagaagaactcgatgcgatgcttgaacgtgtccatcaaatccaactggcgaaagaccgactgaaagaagcctctatgtgggcgtgtcgtgcggtgttccagccagaagaaaagtattaaaaatcaagccgttgccgaaaggtagcggcttttttcgtttttatgcaaaataatgcttgcactgaatccgactttcttgtatctttaaccacgtaggcaagacaacttaactttgaggatgacattatgaaaacttacaacatgaaagaactggtttgcttcaacactcgtcgtgaagcccgtgtgtatgttctggctgctggtaaaaatacctctgctgtaatcgacctgggtactgataaagctgttggcgctcgttgggctgctgttgtagttatcgctgctcctgtgactcctgttaaaactctggttctgggtgcgcgtaaagccgaaactctgaaaaccagcacttgcaataacagaggtgttcataatgtcaccgtcatcaaaaaacgtagctttggtttgagggcttaacatgagtttcattaacacagaaaaagattttgtgatgtttgttggggtacagactgtaaagaaagatatcttcggtaaactgtatttgtcaaacgacgatcgcaaccccgcatcattcgaaaccgatgaagatgcatatatcgcgaagaacaccagcgataacgaagacattcgcaagtatgcgcggatctataaccgtgaagtaacaacccgtctggagagagcgtgatgcgtgaaggtatcgaagtaagaacgtttcagttcgaaatgcgtcgtatcccagaagcatcaatgaatctcattcgagaacacaacgtgaaaatcgtagaaattgatgcatacgcgggtactgatctttataatgatgcgaagattgacagcattgatttagaccttgagggtgatattggggatctgaataagctggctattgcattgaatgcagaaaccaacaaatacgggtatacaatcaaatgaaatatattctcgaatatcatgagcatcaaattaccgaagcaatgatcgataagatgcgggtatataaccaaaacattaccagcgtcaaaccgctatcagtgtgccgtgaatttgggggatactccttcgcgatgtacacaaattccgaagacgacgcaaccgcgtatctgaaaagtatcggtgcaatattcgacaaattcgaaaaagtatggaaggtaggtttctaatgaaaaagtattttattgaagcggcagatcgtatcgttctggctctgctgaactggaaccgtcgccaggatgtttctatcaaggcatcaaccaacgggacaacatatgaccgttatgatccggcgcgtggactccataagccttacgaggttaaagcgtgaagtattacggattcaaaacgagtcattacggtaaagcataccgcactgacaacatcgatcgcaaacgtccgtactatgattctctggtacgtgctggacgcaaacgcgctcgccaggaagggaagaaggaagcagaaaatgaactttgatcaacccattgcaatgataatcggtgctgtcctgggaatgcttcttttgtttggcggaatcccattaactgcatatatcatgaggttattctaaaatggacatcggaagcggttcacaatatccatcatgcgcattgagcaacttcgccccgcatccgttcacgtttgacggggtagaatgcgcatcaatggagggctttttacaaagtctgaaattcagcaatccagatatgcaagcggtgtgtacgctggttggtaaagccgccaagttcaaaggcaagaaaaagaaatggtatcgcgatcagaccctatactggaagggtatgccgattcaccgtgaatcagaagcgtatcaaatcctgattgaaaacgcgtacaatgctcttttcctgaatgacgggttccgccgtgcgctggctgcaaccggaaaaagtaccttgactcattcaatgggaaagaataagatgaatgaaacggtactcactgaacgtgagtttgtacgcaacttaaccagattaagggatctgttatgaaagattatgatgaaagagtagaatgcgcgttcctgttcaaaggcgcgattaacccgctggcattactccacgcacagggtgctttgagttctaccctgattatgggtgttatctacaaagcgggtgtgtattacgttaccatcggcgcgaacaacattaacgtgatcaacagctacgttgaaaaatgtaagctgaaagatattgtgttcgataaagtcgaaatgggtgttccaggcttcgacgctgtttatatgtacaagggttgatgatgggttacgtggtttatttcgattgttcggatcttgatccgttcgttctgcaacaggcaaagaaatatcatcaagatatcactggtatcagtgtcacgaacgatgatatgctgtgcatcgaatttgattattatcgtacatttgagcgtgacaaattccttgcggatattgaagcgtttaaaagtacccttttctttgatcgttatgaggttaaatcttgaaaccagttattcttaccgacattgacgggatcgccgtgaagtggcaaagcggcctcccgttctttttgtcaaaacacaatatgccgaccgatattgccctggatatggttacagatgaaaaattccgtgatatgaccgaaatcttcgggtgtgatcaccaactggctaaaatcctcatggaagaatacaataacagttcgtttattcgctatctaagcgcgtatgacgatgcgttgattgtgatcaaccgtctgaaagccaaatatgatttcgtggctgtcacggcgctgggaaccactcctacagcaagccttaaccgtattgcaaacctgaacacgctgttcccttctgcattcaaagaggtttgtgttgtcggtcacggcgaaacgaaagtacatcgttacctggaagccaaagcaaaatatggcgatcgtttagtatgtttcattgatgaccttgcagtaaacttgaatgagtgtcataacgtcatcagtcagttgccgttattccatatgttgcgtggcgaacgtagtgaaccgagtgtacctcatactaaagtgaataactggcatgaaattgaaaaagcaattgagaactcttgatgaagaaacgcaaggtatagaaaacctactacaatgtattcgagtagaaccagaaaccggaaaatgtttctggttggaaaagagaagtaataaaattcctgctggaagtgaagcaggttcttttcataaatcaagtggatatacgcgaataaaattcgaaaatgcgatgtacatccggtcacgggtgatattttattacgttaatggttatcttccagtgatggttgaccatgttcacggtgttgaatgcggtgatatgatttctaatctaagggagtccaatcaggtaacaaatcaacaaaaccgcacacggaataaaaataataccgttgggtttaagggcgtgtcattcaacaagaaatcgcaaaaatatagcgccaaaatcactttacatggagtgactaagtggttaggattttatgattctgccgaggaagcaagtgaagcatataaggccaaagcactcgtttcctttacacataatgaaaggtacttaaatgatcttacagattttaaatgaactcgcttcgactctgaaaatttcagagaaggaagcgatcctgaaacgtaatgcaggtaatgatctgctaaaagagattttccgcattacgtacacgaaacagattatgtttcacattaagaagttcccgcaggtggacggtaagccaggcacaaccccgctatcgaatgctatcgcggatttgatgtctgatttggcaacgcgaaaatatacgggcaacgcagcccgtgatcgtttgctggatatcgtatcatcagtgaacgagaatgatcgcgaagttcttcgccgtatcattaaccgcgatctggaatgtggtgcgggtacaacgttaccgaaccgcgtatggaagaaactcattccagaacagcctcagtgcctcgctacgccgtttagtgagaaagccttaaaacgtattcgcttccctgcttactcgcagcttaaagccgatggtgcgcgttgtatgtccgatctgctggaagacaagatccgcaaagcatcccgcgcggggaatgagtatgaaggtttggtgaatctggacaaggatctgaaaaagattcgtgaatatctgggttatgatgttgtacttgatggagaactgatttatgtccctgctgaaaaaactgctgtcgttccttcaaacagcgttccatttagtcttgctgggtttatgggcgatgacgacgattctgtttctgaccttgtggcagatgttaggcgggaagctaccgagaacgagacacaagcggaagcgaaacgcgaagagggcaacgggattgtaaacaaatccctgaaaggtactatcagcgacgaagaacagcgcaatattgtttatgttgtctgggatatcgtaccgtatgaagtgtactatggtgatgctccaagtgttcaaccatattgcgatcgtttctctatcctggaaggtgcgctggctggctctggtgtaacatcggttaagctgatcccttctatcctggtgcagaactacgcggaagcgaaaaaggattacaacaattaccgcaatgacggtaaagagggttcaatcctgaaaaacgttgatttcaaatggaaggattcacgcgttgcggatcaggtgaagttgaagaacaaaaccccgatcgaactgcgaatcatcgacgtgtatgaacacaccaaagaacctcataaggttggcgggtttgtggttgaggacttatcaggggaagccagaacgaacacaggttccggtctgactgatacggattaccgatacgatgaagacggtattaaccgcgtgtacatcccgttagaagaacgtggtgaactggatcgcgaatacattatggcgaacaaagatgactatatcggcgctatcgtcgaaatggaagttgacggactccagaaatcgaaaacgcgtaagaagggcgaacctgagttcagtttcttcctgccaatcatcaagaagattcgacgcgataagaccgaaccggatgacattcacgttatcttcgctgatctgttttaaatagcactttttgctaaagaagccccttgcatatgtgaggggctttttgtatattacacacatcgaaacgaaacagacaaaaggaacatcccatgcaaatcactaaagaactcgaaggcaaagtaatcgttctggtaaatgaagaccgtttggcacaactgggtaacggtggtgaaaaactgccagcggacgcactcgaaagcctttctaaaatgcgcgtgatgcgcgttactgacggttgggttacttgtctgcctctgaacgacgaagacaaagccgtatacgatgcacaagcggattcatgggatatcgaagtacctctggtaaacatcgaagttgaagagtgctacgaaatcgaaaaataatgcttgtgttctgggtaatgtaatggtacattacctacatcgaaacgaaaggagaaacatcatgaaagttatgcacactgcaaatcaacttcaaaacggcaactacgctatccacgatgctatcggtgcgctggttggggtttatcttcctggtatcaaactccttgaagtaagttggaatacctttggtggtgttgaaaacatcgaagccgcgatggaaattatcggtgacctgaaatgagtaagaaactcgaaatattcgaaactatcagcgaagacccgaatcttcgctggtgctgtgcgaaaactgggtttgatgctgcatggggtgatactccagaacaggcgcgtaaaaactgggaacaccaacaattgttttttgcctgtcgggttcctaccaattatgaggggagtcaattgttagcatgaaaaataaagaatatgacccaatagaagttaaagagcggttatcggtagcaagaagattccttgaatctatcgaccctgataaacttggaaaatgccctgatacgatttgccttaattgtgggcgatccgtaatggttggaaagtgctgtgataatcagaatatcgttatcatggacaggaaagaagtttcaccggaagtgtgggatcagattcaagagatcatcaaaaacccacctgaaccgacgaaacgtttacgcgaacttatgagcaggaaaaccacgttatgaaaaatgaaccaagtaagactgtgcgccttatccgttgggaaggacaagaaatccgttatgaagatcaggatcgtgaattcgtccatgaaatgcttgcgcataatctgggattcaaaaacgccgcactggtgatgatgcagcaaaccagtgatgaagacacctggcaatgcgtcattctcgatctggacaaaaacaaggattacaccgaagatgaactgtttgcgctcacagagaacgctacagtgcgtcagaagtgcttcatgattgatatgcctcgcgagaactacgagaatatcaagaaagcccgtaaacagaacaagaacaacgtgttcgacctgttcatgggctatcatgaagaaactacggcctaagcctcactggttttgctggtgtcgttagtagccgctgccacctgtacacattctaatgtttgcaggtggaaatcttttgatacgtcgcggatacattcaacgatcagatacttccctgaatattcatcccctaacacctcaatcaatgcccccactttaacatccattcgaccctgattgatatcaaaccgaatacgtttttcataactggataacgtccgacacttcacagcctggaacggttgaccctgtttgtctgggttctggaagttgttctcatataccgcgttcctgttcatggtgatccatgcgttttcaatatcggtactcgcaaggatatcactgtacagctttttatccgtcatcgagaaactaaagaaacttgcatcccctaacagggtagtgttatccttatgggtaatgtattctgctttagtgaataccaaagcgtcacctaaaaacgggttacttacgttgaacttgtaagcctttaacggggtttgtgcgaggatctccgtattgcttttcataaagataccagaaccatcttcccacagataacagaagtcagacgaatctacgctctgcccgttgtcacggatgtaatcaaacacggtttcatacgtcccgctcaggcaagccggaggaatacgcacgtttgatgcgtcgataggcggcgtgatcaacttcatatcattatacagtgccgtcatgcactctgtaatcgtctgtacggcgttgttactgaacgaacgggaaaacttacgacgaaacaccgtatgcaccggagaaaggtttaggcgcagtatagagcggttcatatcatcggtttcgacattcgaatacagaaccccgtagtaatgctgttctaacgtctggttatactggaacgacacctggataatcggtttctctgtcaactgataaattaactggttatcgtagatctgcatcaacgtttcagaagtaccgttgatgatggtcttctcgctcattgagacaagggcaggtaacaattcaagatagacgttatcagcgaacttttcatatgttggatataatttaaccgacacgacgcggtttataactttactggacattagacatcctccctttatattctatttactaaatagtaaatatcgggatacttgaggcgatcatgaaagagaagaaaaacacacttgataaatttatggttacgcgtttaaacatcaagaacagcaaaaataaagtagtcacgttgcctactggcgaacaggttacgatcccccgtctgggttatcgtcatttcactcagattaaagcaatgaaagacccaatgcagttgcttgagtatatcatcaaagagattcaaccgcgtgaattaaccgcagcagaaaccgaattccttttgattcacctgcattatcataatgacgataaagcaatggcgatactgaaagagattggtattaatctggatgatatgaaaatcagcgaagctaagtatgaacatacttttgataaccttcgattggtattcaacaaaccgaccctaatgctggatgatctggcattactgcttaaagaagcgtatgacaacggaaagccgatcgaactgacggacgaaaaccgtattcaattaattaactgcctgtatcgttatgaatatgacgatgtaaaacgtggcgtactccaggaagtctatattgtgcatgaggggaaaaccattaaagggcttaacatcatcggtgaatgataatggctagcaatccatattttaacgaagaacaacgtcgccggatgcaaaatccaccaaaaacacaggcgcaaccaactgttcggaagatccaggcaacgttagataaagattcgatgcgcgagttaaaggatatcaatgataacacccttgaaaccgcgctgaatactctggacatcaaagacagtgtgaaatcctttgaggatcgtttcaaagagaaattcgctggcttccaagaacaatacgaacaggatcagcaaccacttgctgaacagttgcccgattttgttggtccatcgcgtccaccatcactgacagacaacagcacgaacagtgttgataactccgtcagtgtatcgaaccaacacaaccctttcagcaagatcgaaacatacaccggaacgattgcggaagcaatcaccaagttcctcgaactcgctgagaagaaaccggaaccgccacctgaacctgaaccagtaccggaagaggaaccggaggtcgatcgggacaacaagaagatccgtgataaggataaagacgagaagaaattcagtaagaaagtattggccttactgggttcaatcaaggataatacatccggtcttctggctcgctttatcgggtattctctcgaagcgatagcgaagtttgccaagtgggctttgattatcggtagtatcgtgtttgctattgaagttttaggtaaagtcatcgcttcatggtttaatgatttgcttaatgatggagaagcatccaaaaagttgtttggatcatatttcaacaatataaaagcgttagcgaaaagtatagatgacggattagataaattaggtgataaagatgcaacattagcagaaaaattaaaagctctgttagtagaaccgtttaagattctgggcaataccattaaaaccgcaatcacggaaggtatcggtaatctaatctatgctctgggcgaatataccggatcagaaacgattactaacgccggacgcggaatgaaagtatcagcactgcgcgacaaacaaaaatacgctcttgacattgatcccgatgacctgattctgctgaaacaacaggagatccagggtcagaatgataaagtggttgaggcacgttctaaggttgtcgaacaggttaaggctactcaaggtacattctcatatggtttcgggcaacagacggacgcacagaaagcgctatctaagcaattggaacagatgcgcgatcgtgtggctattgaagaaaagatcaccgaagagaagaagaaagaactgaaagcattgcaggaaaaccccaaactgttacaggctgaggttgataaagagaatgccgctaaccgtaagcgcgtgaacgaaaccaaacagaccgaaaccgagcaagcgaaagcgaaacctaaagcggatagtgaatttgatcagggcgatgaaattctgaacaaagacaatctgacgggcaacgataaaaaggtaatggaaaaactcatagaatcgcttgaagagaaaaacaattcgaacaagctgaatgaggacgacaaagaccgctatcgtgatatgatctcccgctggcaggaaaagatcaccgcagtaccggaaacgagtgcaagtattgacaagcaaccggaagcagtgaaagcccctgttcagcctacaacgcctaacagtgttcaggtcaataacaaaacagtaaacaacacggttcagcattcagtacaacgaactgaccgtaaaccattgattgcattagcttaaaggaaatttaaatgaaaattacagtattgcaagacactgtacaatcatttgcagaaatcaaaaatgctggcatcccctctgggggtgctgcaacaactaaaaacgcgttgactcaaccgatcgtaacagcggaatttccttcccaacgtgcagcaggtatcgataacgcttataatgcatcaagcctgtataataacggcttgctgttcactgcatatgaattcacgggcggacttgcgccaggtagcaaagacaactaccgctcattacgtcaggcggcacagaatgcgcaacagatcctgagcgcgaatacaggcaacgttcgatataaacaagttttgaatagccgtactattggtacgctcaaccccatttgtcaaatacttttaccgcgaagcctgaacgataacgaggttaacagccaccgttatcaagatgcaaccgatagtattgttgctaaaggaccgtcaagagttgtgtcaaacgttatctggggagctattgagtctgctagtggtggtattttggcagaccgtagagaagcagttgatgttggtacgaaagcagcgtttcaaggctctgataagcgcacaaagatgtattacaatactttcgttatagaaagtcgttatgatctgctagaacttatcaaaatctattatctattcacggtgctgggttatggtacgacatcaggaggaactgccgccgaaatagcagaattagctaaacaaacaattaatacatcatcaacagcaggggcaaaacttattaataatgcagttgcgggaaatggtcctacacctactgtgtctaatggttcgattataagcgatcaggcggtggattttgttactaatatagaagttattaaatcgcctcctgtatggtttatacgtgatttccagacgggcgacagtttacggttccctcattccacgttcgggccagcaggtattaccagcgttcgtttcgggcgtacaatggacaacattgtaaatacgttaagagaatcaccgaacaccccgatcgcagttgaaatcgaaattcagtttatggaactgatcgatatgcgtcaggattcgatttttgatacgcagtattaagggggaacaatgttctatagcgtagatgaatttttgtcaggaatggcaaaccgagacttccagcgaagcaacctgtttagtgttgtattcgcaaccagtccagcatcacgcattctcgacagcacgatcgggagtatccgcgatactttaattgatggtactatgagttccattaacgcgaataacccgaacgagttcatgaacgctattacagggggcgtaagcaagctattcagctatacggttgataaagctattatgtccctgaacaaaacaggtttcagtaaaatcatgggggcgttaagccctcgtttaattacttccctgtttggtgatagtgtttacggacagatgctaacagaattccgtgacaaaatgatgtacaatatggggttgagcatcgttggcgttcagttgcctggtaaaacactgggttatgaatacgtgtataatggcggtgtaccccagatccgattcacccgaccggagaatggtgaattatcgctaacgttccgtgtggattcagaagcgcgtaacctgaaagtattcaacgaatggttatcagctattcgtgatgatgtatcaggccagttcgcattcattgatgaagtatcaagcgcgatccaggtaaacttacacaatcgcgatggtgtcccgcacagcacgtatgtattccagaagtgtttgcctgttaaagtcagcaacccagaactgagttatgaaagcaataacgaaatctggacattcactgttgactttgcttataaaacaggctggcttgttgaagcagataaagaaggttgggacggattcaaacaatcacttatcgaaggtgcagcaattgccgttcgtggtgtggttacaggacaataaggggcgaaagccccttttgaggttaaaatgattgatataatccgcgtaaaactccctggtggagtgaagcgattccctatgtttaccgtgcgcgatcagttgagtttcttactcacaagcgcggacatggaagggaagacgctcacagaacagcaagaaatgctggatgaaattttagatattctgtatccgggttattcccgcaccgaacaggaaaacattttcactaaggtgtattgtgtatcgttcggtaagaacgcaataaagatccgaatcaaaggaagcagcggacaatcagaagcattcatgcatgtaactgattacgttttgcaaaatgaatatgcccttgatgactcgcttactctgggattcaaattcccgaaacatcgtaacaacagtgaacaattattccttgaatgtatccagtatgtcaagcaggacggcgaaagatacgaatggaatgcattagacgaggatacaaagaacgcgatcctggatctggtgtctattgaagatatggaaaatatcgttaaactgttacgcaagtcctgccatgttaccgtgcgtgatattgagttcagcgacttattgacactgtacaaaatcctgttcaacaaatcagaactgaatgagttcttcaaaaccaactatttgttaaataagaataccgtacagattgaacctataatgaatggaagcccgatggaacgttcaatttacgttgcactgctggcggaagacttgaaacgaaaagagaatgcaaatgcgtaaacatacaccccgacatatcccaaaatataatgtgacttatcgcccgttaaccattggcgatcttgatgacacggataacttcattattgaaggtgatgtgttcaagcatcagcgcgattatgtttacattatggctctgttcgacagtatcaacaaagagactgtagatctccaaatcaaatgccctgaatgcggggaactgattaagtttgtgctcaatcgtcatcatatcatggtggatgaatacgaagaaaagctgtacggcaatgagatcaagatttcagtcgaaccacaccgcaccggaaaggaagagttacccgaactgattaagtttgtagtcatcgacggtgaacaaatcttatgggatgactgtaaagagtcagagaaagaagccgttctggatagtatcgactatccggtctttaaatcaataaatagcgctctggataagccagcaatcgttgcaaacattccggtaaggtgttcgtgtggctacgagcatatcgttgcactgagaggcttagaggcgtttctaaaggtggttggataaaatgggtgttaaccttcgcttactgtatagcgatatcgatcccaacttaacaaaagactggaacaatgacgtagccgcctcgaaaggggcggcagcggtaaagaatagtctgatcggtatcgtaacaacacaaaaaggcacacggcctttcgatagcaactttggttgtgagatcggggaacagattttcgagaacatgaacccgctaacagcggaagcagtaaggacttcgattgtctccgcgatccgcgcatacgaaccccgtgtttacaatctggatgttgaagtgattccgcagtatgacgaaaacgcaatcaccgtgacgatttactacagcatcattgatgaaccggaagaagtagaaagaatcaaactccagctatcatcctcataacaaaaaagccccgaaaggggcttttcttattccatcacgatccagcccattagctgttgatatcgcaattcgaacggggtgatgaaagagcggttattgataaccttcgtcccgttataggacttaatcacttcctcaccacgaagcacatattcgtatacttcgtccatcgtatcataacgaacttcttcgacttcgaagcagaagttggaatattcaatcattccgatcttgttcgcgtaacgacgttcgatacaaccctgtttttcaatctgagtaatcgcagtatcaatgaactgcgcaagtgcttgcatgaaattactacattcgacttcacggcctccgcttgagatagccaggtaaacgcggctcaatccatcattgccgatgtaaccgatacagtcaccgccaatatagacagaccagactttacccatcggccccatacccatacgattctcactacgagaaacacctttcagtaacagtgccatgataccgccgcgaacgtaattcattttcatgataagccccttattttttcaggttgattaaccaagatggttgggtttctaaactaaccgctttccaagcatatgcaacactataaccggaatacgtctgacatacaacagcattttcatttaaatatttcactttgtgatctgcctcttgttcattcagggcagcacacacgatattcttttcatacactccgccgtttggctggataatggtttcttcaatcagataaacgctgttcatgctaattccttctcgattgcttcgatgatgtggagaacgtaaccgttcagttcttttgctttatcagcggcttcaaccataccataacgaggaacttctaaaacgttcgcaccttcgagcaggttgctttcgatgtctacgattacatagctctcaccgattgccgcgccttttctccagtcttttacgaacttcatcattttagctttcatgttctcgttccttttggctgttccgtttcgatatgtgtaatataacaaagccctcacgcgaacgcaagggcttttttggattaactgaatttattatagagagtaaaattaatccctatagaattcagtgctttacatgttgcatcaagatctgttggttcgatttcgatgatgtatttcaacgctgtgtttactggaatggtttctggttcttcgaaagatgccagggttggtgctttcaccgtttctggttcagcaagcacggttttctttacgtcaaacgcttctttgaacttgttgattctttttagcaggtcatcaatcaattcgatgttagctccgtcgaattgtctggtttgttccagcatactcgtaatctttccgtatgtagtgcgtctggtttgttccgtgtaattcccgacttcataacggtcgatccggtcgatgattgcccgaatgtgtccaagattagcgcgatcgaaatacgcaatcagcttagattttctgaacacgaacatatatggagcattaccgacaatgtaatgagttgccgttagaccaaaactaggatcgatcagaattttaaccgtgttgaaatacgggattaaatttatttcacgttcaggtaaacggaaaacttcatctttaaagttcttcccaatccggtcgatctcttccagagttttacccatcatcgacgaaattatttcaattttttagatacataagccatttttcaattctcatttaattaatgcataaaagatttgacgtacttcacgatttcttcacgacacatatcgaccggagtatcctcagcaatagcagcatgacagaagatttcaccatccagccagaacgatagcatgtactgaatatcccgaccttcgttttctttctggtgtttcttgatgcgatcaaatgcatcatccatgctttcggtagctgtaagcatttcagattcacccgctacagcagccatttccccagcttcatcactgaattcgctttccagttcttcccagtatactatcgttatcatggattaccccaaacagattttacatttacatagaggacattccgcctctttaacgcgcaagcgctttgttgctgttcgcttcgctgtgttgtgatcatacacatgcaaacagcgataacagatcaccaatcgtttagccgtcataaccaccaccgcaacgaacatcaccttcaatgaacatttcgcggttatctctcaggagattgtatttcttttcgagttccggcccgaatgcgtccgcgtcgtcataccagtcatagttataacttccggtttcatcgtcgtattccggttcgccgccgcgctcattgaagtgaacgattttaacatcatccagattcagttctttcaacttgtcccagatgcgggttatttctacgctattacatccgaacgcttccagtgtgattgtgccgtcatcgtgtatttgaggtaaatcccagcgaggacgagtatcatcaaacatatccatcagagattcaacgtttgactcaccgtaaatctttgcaacttcctgttctttaccagggcggacaagtcctatcccgataatgaaactactgcttgagctattgctcacgaacccagaacgaatcttcatcgtcttgcctcatatttcgcgttctccgcgattttctcatgatacaggttgtatgacaacaccagcgggatacttgccacgataaggccaatgacaaccatttgatattcgcgcttatcgaacgccatgaatgaaatcgcagcgcccagaataaacacacccaatgcaatgataaagaatagagtcattttgacagggtatccatttcacgagattttgctttcaggatgtcaatcacagtagtcatcgcctgttctacatcaccatcatagtgaatcaggaatgttttgtgaagtcccatgatcagacgattgatgatataagccatttctgacggcaacagtttaccattctggcgatcgtactttccaaacaggcggtagagttctgcgctgttgcctggcttctcgatgctgaaattatgcattccagacagaagaccatccagatacagaacagttttgttatcactgcgcaggtgtccgccgaccttgtagtagttgctgaatacatacgggttttcgcggatatcttcgataccgaattcaccatgatctccgatattgccaacatgggcgaagaaattatggtcttccagttcgagaaggattgcaccctttttgtaagggaacccgactaaatcgatctgccagccattttcaccgacaaatacatcatcaacaaccacgaaatccggcagcataggcgcgtatgcgtggttcttttcgttgttttcacgataggcttgtggttcggacaggtacaggatatcgccttttacaacttcaccccagaatacgttacgtgacatagtattttcctcaatatgccccctttcgggggcggacattgttagattttgacttctttttcttccaggacaatttcacattcgaatgatgtggtttcccagactttccagaaatcggacggaatattatcttctttcggaagaatatctttcgcagcgatagaaactttggtttcttcgaagtccagatccgcgaaccatgcatgtgctactacaacaccgtacattacgcgacttaaacgagcattcagtttacggacttcctgaatcgttgcctttgtctgcttatcaagatactcgactacctgatctttgtcaagcgcatccagttcagatttcacctgatcgtaagcccacaggataatcaggtcgccgttgttcagtttcttcttaccttcttcacgcttcgcgacggtagccgctacagcaggaagggaggaaacacccttgattttcacgttcagttctttcgacatgtaaacatcagtcgattctgtgcgctcaaccttcggagagaacccgtaatcacgaataccctgttcagacagccattcaccagcagcctcaccaaagcgctgtttcagcccttctgcgttgcgcagtccgatcgcgttgtcacggaagaacttcataaccttctgacgacctttcaggatttctaggcgcacgttatcagtcacgaactctttaccgcttaacccgcgagtcatgccacggttaaccagaggcagagaggtaaagtctaccagaaccgacatacgatcatcaccgattttttcgagcggcttgatagtcaggccagaagcacgaaggtttttcagtgtcggaatatcggtttccagcggcagaactttaacgttcacgataccatctttaacgatggtgaagttacgcacctgcttagtttcgactttttccggcagaccgaattctttctgtttactttctgggatagtcacataaccttccagatccgtgttaatggaaatgttaggacgggaactgttacccaccagatgtttaaccgatactttggttgtagtctgggtgaacttcggaacccatacttcatgtgctaccatttgcgccgccagtgctttacgttcttctggggttgcagcgtttgcgatctgttcggtcagttgatccagtgtatcatcttctttctgtacagtctgacggcctgtgcggttatacgcccagtgctcagaagacaggtcgatcactgtgtcagtttgtgccagcagttcgagcgcatcaaccagagtgaacgcgttttcgtctggaaccatgttgtaatcaataccatcaacgaaacgctgtgatggatctacaacagcctgtgcaatcaggtctttcgcgttggagtagtcctgtttggtaaagcagttgtcatacgccttgatcagacggacatcacccagcttttgaagcactttccatgccagatcagggttcattgtgtgcagtgcatgataaagcacgacatacagaacttgctgttcgctggcgatgttcggatcgaagccgtcaacatcattgatcgcgttgtcacccagcgcccagatgtttttgatgtgttctggaaccagtacaacaccgtttgcagcgttcaggacatacacgcgcccttcgtccaggtagatcgcatgggtagcatcagcaacgttgacttcgatacgcgcggaagtctgtgcagtgataatttcgttaaatgctggttcgtatgcgtcgaaaccttcaacgaatttgtgcaatgcgttggttgcttctgccattttttccagcagaggacggtttacataataaccgtattccaggaacgcgatactgttgaaagtcagtggcagaaccgcacacgctttcaggatgtcatcggtacgccagcagttatcataaccgtctgtcagaaagatcaggctgttcaggttgccgttttcggattgcagatcggtagcgatttccgcagccagattcaacggctcaacgaagccagtacaacccgtaggtttcaggtaacggtcgatagccgcgcagatgttagacaggtcagagacattgctaaccttctcaccacggaacaccgtgccgtaatcgcctttgctggagaagtacaggatcgaaacggtgtcatcctgtttaaccagactcgccagatttgctttcaggtgtttacggatcttaggcagttcgttgtacattgaaccggatacgtcacacacgaaaacgtggtttgtcggggttggcttcgatacagcgtttttgaattcgatatttgtgattgacatttaaattttctcgtatttgaatttttctaaaatttcgttaactttattgcttactgcttcgactgtacgatcacacccgaacttacgcgccaggagttcaacgtattcatccatcgtagtgagtttggattctgcaacgtcaaacgcaagcgcatacattactggattcaatactcgaacgatttggagagtatactcgttcagttcaaaacgttcaagatattttcgcagagaaaatacatcaaacggtgcggggcgatcctggctaaaggggatcgactcccctaatgcatagcgaggcataacaacgcagacttcggtttttaacttatccatcagtgatgactctttgatgtgtgttcaaggttacggaagatgtttccatgttccagttgagttccgatcgggccgcattcatcggagtacgtgaattcatagataaacacgccgtcctgattgccgaacttcgtgttgtactcttcatacaaccacattttgatcagagcgtctttctcttctgtgtccagatcgtaccagtctcgcccgtcatacgcaagcgcaatttgagggtttgaacggtatcgggtttccgcgctttcttcggtttcccagtcatagcgtttatcgtcgtagaacgattcaaagctgttacccagatgaccgcctaaatcacggtgaacgtgattgaccacttcttccgctgtcaaaggcggatcgtagtaaccacaatcagggacgcaatcgcccatcatttcgcgcaggttgtcgatattagtcggatctttcgggaaccggacgatgaaactacttgatgaactgttgctcacaaaaccagaacggattttcattttacatcctcaaattgtaagttttctttggttgcgttcgcaacggctttttcgttgctcagtgttactatgcgcagacgttcgccagtaaagccgtcgcattcagtgatactcacccagtcaaaaggtttagccatttcaatcgcacgttccagcgatacggtagaaccaaccaaatcactaaatgtatagtaatcttcgcttaaactttcaacagtataaattttcatgatactttaccttttgtttcggatttcaggacgatgttactgtaaggatcttttgctaccagttcccacaggtcgccaggatgttccccgctacggtagacggatgaacggatgatttcgttaaacttgctcagggcttcgtctatgtcgtcatacccgcatttgagaggcttacggttgcaacgaatgaagaacatttcgttggtattctccccgcgttcggcgtttttaaccttcataccgcctccattttaccaatgacttcttcgtatgtcacagggttaggttcatagccgttagcgcctattgtatcgcctactctgtttcctactaaagaagcaaccgcaactttcttgccgtctttccacgcagtgaaatgcagattatccgcaacatacgggaaggtttcgtgattgttcaccgcgtcgatgcagtccataacggtatcagacgcgcagatcagattaccaggttcataatcaaccaaacattcaacagtgtaaatcataataatttcctcacgaaaaagcccctttcggggcttgattaatcagtgtccgaacacaccacgaatagactctgcgaacgcgtacagttcagggtttttcgctttcactgtttcgatttgttccaggatgtaatctggtttgtatttcgcaccgaaccagcagtaagagaaagaacgatcccacatgaacacgttgtagtattcaccgttacgcacttcaaccatcacgtaacctggattagaacccagcgggtaatctttcagtagattaaatttcgcaccagcgccagtacatccgttaaacaggtcattaaaagtcatggtatgttccttttcagtttcgttttggtaaagctaagataccactatcaactactggatgcaaacacttttttgaagaattttgtttccggtctttctttgtacggacgcattaccaaatctttaccgtccagcacggttggcttaccttcgagttcgatcaggatgaagtttcctttatgatacttcaatacgccctggctggcagaccattcatcattatcccagtggttgtaatgccattcaacaacggtatcgatcgggatttctggttgatttctcataatactttcctaatttgtttcgctatggcttcaatcacgggtattgaaactgaatttcccgcttgacgatatgcctgttttttactatccggtatgataaatgaatctgggaacccttgcaaacgaaaacactcacggggagtaagtcttctggggttctttccttcctgcaacaccagacattgaacgccgtccttgtaatactgctgggtgatagtcccagtgtgcgtagaatcgcttgtgacggcctgataaccgaaacccttaccgtttgccttatttcgttccttacgctctctaaagcccttccatgcgttatctgacagggtgaacgaatcatcagcatcttcgaggatgtcgcctactcgcgtaggggtgcgcgggggaaccggaaacgaaaagaatacgtcatccagaaagcagacaataaacacgcgttcgcgtctttgaggtagtccgaaatcctttgtgttcaggcgttgatagaatacgttgtatccttcggcctccagaagcccataaatcgttttaaacgtcttccccttgtcatgggttagcagttcaggtacgttctcaaagaacagcacacggggctttttagcgcgtataatgcggaggatttcaaagaacactgtaccgcgcacatcttcgaatcccagtttcaatccggctttactgaacgcctgacacgggaaccccgccagcaggatatcatgatccggtacttcgttttcatcaatctggaacagatcaccttgtaggttatcattgccccagttttcgatatatgtttgctgtgcgaacttgtcgatttcagacgttaaaaggcattcgacaccgccgaatgccttatcaaatcctaatcgaaccccgcccacacccgcgcagaggtcaattattttcatacgtcaaaatcaatctcgtcaattttgtatgagttttcgtcaatgtccgcccagagggttacattaacatgtttgctatcttcgtacaactggcgaccatcaatcccgcccgtgtaattgctttcggtacgttcagtaacttccagtcggaggctatcgcgcatgatctgaacaacagcctgttccagtgtaactgcgtctgggtttttggtatcgcccagtacaacatctttaacgttcaaaataacatcagtcattagtgccactccgttttaataccgtgtcggtatgcgtcaatccccagtggggtaatcagcaaccatgctttcgaattatcgtgataacccgttactcttcgagcgtaacctttttgaatcagggaatcacgccctgatttgctgggtacgtcattgaaatctaagtctagcactttagttgcgtatccgtaaagtttatacagaacatcaatttcagcgccggacaatttaggatacatcatttgtaataccccacaacatgatcgctgtatatgcgttcgatgaaatcgttccagaactcgcgatcaacttctttcggatatgttgaaatcgctgcaaggcgttcgacttcgcccataacttcttccagtttttcctgtacggttgcgaacggtacgccgccagctttaaccagtttcaggaatgcgctatcaggcagaggataaacgatattaccatctttgtaaatctggatcaactgcataccaccgcgcaacgcgtgacttaatgctttccagtcgatcccgttgttggcttctgcttgtcgtgcgcgttctccgtattcatcccagagtttatacacagacttacgcatttcatcggatttgatcgtgaactggaatttacgccccagcacttcatagaagtcctgacaaccagatttcattgtcgtgtcggtaacgaatcggcagaactcgtttgtagggaaacgatccttgatgtcagacactttcacttcacgcgtatagcgtttcatatctggcgtgaattcctgaataccaccgatcgtttcggtttctttcagtacatcgacaacttcgcgcagtgcagccaggcgagaacctttcacaccatattttgcggcttgcttgcgaacataaccgaacaggccagttagttcagtggtgtaaaaacgccagcggttagcgcggatatactgccagatttcagagttagcgatcagcttgtcatccgaagcgtgaagcatatcgagcgctacggtatcaccatcacacgcaaggctgataaacttagtcagactatacaactgacgatcaacgtcgtctacggtgtttttagagcttttatcgcccgtgctggtgtcgatagtctttggggctttccccaggagaatatcgcgcgggtgcgggagaaagatccctttatagtctttatcgcttgtcggtgtgttcagtccatacaggtgagaaccaaacacggtttccattacagttttcaaaatttaacccccagggtttttgcgataccgcgcagttcagcggtagtgatttcaggaacaacaacagcgtgagaaccgaactcttttcggatcttttcactcagttcagcacgatactggatttctttgtataccgcttcgctgcgatacatataaaatccgccccagcccccgccactaccagaagtcaatccagtcttacgatcgactttctcgatgttccggcttttcaaatcagcgtctttatcagtggatgcatacagatattgacgcgcaacctttagaacgtgaaattcgcgagggtttgctgttttacgggtattgtataacctttcgccagtatcgtaaagggtatcacccactttcacatcagttaaatctttcggattcatttcattttccaacgttttgacttttcacagtagaacaccggaagacgggacagaactggcttcactacgtcttcccctgtgttcgtgttatgaactacttcgatcgtaagggattgcccttcggacggccttacaatgtccagttccaggatctcacgattaccttttgtattgatttccgctacgtagtaatcgtgaccgttgatgtttacgacatcacccataataacgctaattgtgtgagtcatgagtatgcaaacttaattttaatattcagggaatccagcaggatcgcgtcacgtccatcaatgacggtcaatcccatgtatttgttatcgtctgtgctcttacgggagtacatgcgacaaaccagagaaccatcttgtgcgatgtattcaacgtggtattcgcggcgttctgacgtgaagatgtctccagcaacaaccggacgatcgacgggttggcgtttagtcccttcgaaggacagtttaccgttaccgtctacggcgcattcaatacctttatgcgcgatgctcgcaacagtaacaggctctacagttccaccgatcagcattgcgggttcttttgttcccagtttcatcaccagcgtttggcggatattatttgacattggttcagtaacaaacacataaaccatatcatttttatcacgcgcaactgattgcaaggtgtaattctttgtacctacagaacccgtgtgtttaattcctacacgatgtccaggttccagcgccatacgacattttacatcagagataccgctaagggttgccactttcatgatttattcctctcaaattcatcatcagatttccagtacacgttgaagttacggcaatcgtggtcggaagtcaacgtatatttttcttttgttttctcgtcggtgatcaccatcgtttcattctcgatcgagtccacaccatagacgaatactttatcaccgcgtttattcaggaacgcttcacctgtttcaaccaactgccagcagttgacgggtaaaccacccgcacagatcggacggtttacgaggcagtaaggacgtttaatcatttaaattcttccattgcataggaagtaagatctttgaaataccttgcggtgttgccttctgggttgtttgtaatctccatcaggataacagcaccatcaactcctgctttcttagccatgaatgaaatggcttcggtagcaataatcgttgctttcataacatcagctttagaaacgttgatcgtattcatttttcttccttttcattattcatgcggtatgtgtatataatacaaaagccctcacgcgaacgcaagggctttttaatcttttatcagagtcccgtgaaagctacaacgatttgatagtggtcatcgaagaattccccttgtcgttgtacgacctcatgtaagggcatccagaacgcctctaacgcatcgtcagaaccgcccataatgcggggcagacttccatcattgttaggctctaacttgatgtactgcgccacagtcggttttgagaagtgtacggaacgcttcggatgatcgaacagcatcgaattacggattgaaccacggataaccttttcaggaaccttgatccgtacctcttcgagcagttcgcggatcgcacaatccaggaacgtttcatttgcgtttttgtgtccgccgggaagggctaacgcgtctttacctggggcgaacttacgacgaattaccagcaggtgattgttgcacacaaccacactatcacccgtgcaacagtttagcgcgtcggggtatgggtagtttttgaatttctccaattcgctttcccatttctcgtattcgtagaataaacgccagaacgtgtcttccatcatccatttgtcgatataatcaacggttgcttgaggaacaaagcgcaacagtttcttatcccacccgtttttatggttaacgataatcggacgcagatcggttgctgatagatccttgccgttaatctggacaggtggaactggtacgtgtgtccatccgaacgctttaagccagtatgaacctgcatctttttcgtaaccgtagatagcgattttgtcgcctttggtttccctgatagcagtacgaacagaggttttccatttctcttcgttgtaaagataatctggaatgtgctcaaactgaacacgaacaacatcttcgatcgggaagttagcgtttaaccatgagaagatcatggtttgacgctcacgcgccgtcagcgggtttaaaacgttagggtaagcatatgctgaacccagaaggatgtaaacgatctttgcttctccgagtgctttacgcaccattgctgcatgaccattatggaagggttggaatctgccaattacgacagctttatcaaattgtttcataacgtgctccacgtttaaaggttaatcataaaacagacgcaatcaccaatacaccaagaaaaccgccaataaagccgaagaatagcgaaatgaagatagtaaggatgatctgttttatgttcattgtagtattctcgttcggagaaagcccccgctctgggggctttaaacccttatttacgagaatcgaaaatcactttaccagcgtaatcagaacccatgacagtttgaggtacaccgccctgatatttttccgcgatggtctgctgaacatcaagttctttccagcgaatcatttctggtgtaatggtacgctgcaacacggcgttcgcttcggcttctttcttagccgcatacagacgggcatcagcatcacgctcgttagcctgtgcagcattgctacgggcttctttatcggcaattgcctgaacaactgcctgttgagcgatttgctctttacgtgccagttctgctttctctgcgttcacctgttcttcacgaattttcgtgttttcaacctgcttcttgatcgcttccggcaggtcgatatcctgcaagaatacctgtttcacggtgtaaccgtaaggacgggcatactcttcaacttcctgctggatcgcgatctgtagctggctttgaacttctgcattatacagatcctgtgctttcggtacagatttaccgaactcacggacagttgacagaagtttttcagtcacatatttatccagcgcctgatcctgactacccgcattgatacggttgatcggggctttgctaccatcgaactgtaacatcacggtcatatccacagtggatttgaatttatcctgggacggaacctgcaatttgtcaaacttcattgcgatgtctttggtgttgaacacctcgaaatcagccagtggatttaccaggtggaaaccaggcagaacaggcttcggtgaaactttacccatgaaggtttgagtttttaccgtaccatcctgaacgatagtgtacgagttcggaatcagccacagtgcagcgattacgcccagagcgatcagagtggttttctttgggttgtttgcgatagtgtttaagttcatcattatttccattgggtttatgtttcaattcgatagttattctatcatcactttttcgcttgtcaaactctttttaagaaagttttgtcagcttgtaaatcgtttgatagcacaagcctttgatctcgtccaggacgttcttcaatgaactatctactgaatcatagatttcgttggcttcatcggctattttacggagatacgcgaccgtgtcaagcacattttctgtttttaatacgggtttgtatcgaccagtaatgcctatatggatttcggtgaatttatcaaccaaatcctgcatatcttcgtaaaacccttcaaatgctttatgctgtgaatatgaaccagtcgcaaaatgtgcgctgtgcatataggttacagacattaagcaagtgccaataaaggcatcaattttactcgcggtatcgcgttctgttacttcgttaaacgtctgcatcttcatcccttatgaacgatgaatagcggcgaattcacttgcaacccgtagccctaaacgtttacattcgggttcagatttgcattgtttttgctgccattttcgttccatgtaattatagaatagttcactggtatttacgctgggagggatggtgtcaagatatacctgtagcgccgcattgatatagtaatcgaactctttggcgactactgacctatcatcagcatgtgatgacggagacaagattaacaaaccaaacatcagcgctttagatatgcgtttaatgttcataagcaattctctacgtgcttacggatcaacaatagatccgttcctgtatatatttatagcaaaaaaggggcgattcgccccttatgtaaaattagtctaaaaatacatcaagttatctcataccagcataagctacgctcaaaagcgcggatcttatttgcgttctcgatattttcatcccatccaattacgccagctttcatccggcgtaattcctgacgcattttagcgcgtactttcgaatcaatctttttcacagcgattgaaagcatcgcggagatatcacgatgagctttgttaccgtcgcgattcaggtttttatcgaaccggatatatgcgcaacctgatttgtgtttccagttggttgtataccaacgtaaaccatcaggactttccccgtgctgtgcataatactctgaaaatgcttttgtctcttcgatctgttcgatggaggacttatcacggactggaacatatttcttacggtaagtacggctcatagtgttctcctttgtttgtctgaatacaccttaacagttcagaccaacattatcaagaagtttttcgtgataatgtttgcgacagagcgaaacgtatttgtcttcggctccgatctcaacctgcgccccttcggttacgaagttgccttgtgcgtcgatacgtgcaaccgtagttgctttgcgtccacagtgacacattccgcgcagttctcggatctcgtctgaccaggccagcaaccagtaagaaccctcgaacagattcaactggaaatcagtacgcagaccgtaagccattacagggatttcgagttcatcaacaacgcgacatagatcgaaaacatttttcttcgaaaggaattgcgcctcgtcaacgaagatgcaagcaattttattccggcgctgaatgtcccagaacagatccatatcaggcgcaatcaattcacacttttcgttcagcccgatacgcgaactcactgtgtttgatgtgcgggtgtcgattgctggcttatagattacaacacgcataccgcgttctttataattgtgcgcgtccgtcaatagtcgcgcacttttgccagcgttcatggatgcatagtgataatacaatttagccattgacacgctccacaaacttaatatgattctggaatttgccctcaccttcatggtttttgcatgttttgtttgaacagtatatccaccaatcccactcgtcgtaagggggtttgtcaatgttcatgacgcaaatcaaaggaaaatgacaatcccgacaacgaactttttctataatgtgtgcgttagccaattgaaaaccatcctttacccatgagtttttcattatgtcgcgcaagatgctctttgatttccggtatctggatagcaatatcatactcttctttcgtcatagtatgatttgcgcaacccatacacccacagacctgcgcgttgcaccagcgaagtgttccatatgtcgcgatcactcgcattgctttagctttgattttgtcagtcatgatttgccctttccactgccaccgcatcacgaacagcatcattgatttcattttcaacgaaatccaggatatccgccgtaatgtcgtcgatacaggattgattgtagttgcgcgaatcaggatcatcatcttctgcataatcctgatatgcttcgcccagttcttttagtttatgttttaacagcttttgttcttgcggtctcattctctcgcctctttatgtccggcatcaaccagatcatcaacaaagctaacgatatcatcccaccagtctaacgcttcctgcgatgctttcgcgtcaccatcaaggaaacgatcacgggcgctcgcaaacttctctattttgctataaagtttttctttattggcttcaatcatgataaatccgccttacgtggatcaaccgatggatcgaagtgaacaacgatgattggataatcacccgtacactcgtcgataatggcgctaatacgcaaccaatcgccaccagcaagccccgcaccgataagaggggtaatgataggcaatttttcaggaaacgcactggcgcgttctacggcgctcacaaagcatgatcggattgcgtcataatccacttgcgggccagtaccccagaatttaaactgagtgtaggcattgaagacaatctgaccttcttccgtcatgtagatggagttagtgcctaacttacgctggtctcctttcattgtcaatgcatcaattttgaacgcaccagggattttgtgcttcacttctttagcaatacccgcacccatgttgcaataacagttacacccatgaatcaagtgtacttttcgtttcaggaacaactctacagcgttccctttgatttctttaataatcattttcatcacctgtatagtggcggtaagccagcacagccagccccgcgatcacaacaataacacacattaagatataacctgtgttcatttaaattggtcatcccatctttgccacgcttccaactcgtcatcatatacagggaacgagctttcgtttggctttttaacgtaataccagataatgattgcagcagcaatcacacacccataaaagatcactaatcccaacatcagtataatcctataccagcgttatattcttcaaccaggtaagtacggagtttttcacaacgttccttatttggcgctttggtgcagaggttcatcatcggttcagactgcaaaaactcacgctgtttaaccagcttctgacgcttgaagaggtgcgcattttcttcgccccatacataagccgcgtccagttgttcagcgattacctgttcacataccgcaacgtctttaatgtcacgattattgcagagttcagccagtcgatcatcagcatgagcaaagccagcaaacagagtgagtaacagcgcaagttttttcatcgttttaccttagtatgaatcgttttcgataggggtataataatgggtttcgcagacataagcaagcactgatcgcaaactatcgctttcaaattctggcttttgattgagttccagactccagccagtgaagcacatccagcgttcttctgcaacgtcaaaggctaaccaatacatgttgaactgtgaacatgtatgttcgaagatgtcgaatagtagtttaccgccgatcggtttcacatatggtttcacgcgttgaagcgatttcaggactgtttcgaggttactgcgatcctcattcatcgcgatacgaagaatatgctgattggtttctgggttgtatccatcaatccccaaccccatatcctggaagaacttagtcgcatcatggaaaatctctcgtccgctgttcggggaattgatgtaaaacttaatgcgttgttttggagtcatcgcgcggacacgggaagcggttttgtgatcgatctcttctttgatgtctttgcgagcgttcagaagtttattcagcttttcctggtaaggtttcattaccgccctgatctcgtcgatacgttcatcaacgatcgctaactgctgttccggtgtcagtttagtttccatgttaagcccctacgcgcacaaagcgatcttcaattgcatcattaacacattcgtaaatgctaacgtcattcgggacgtgcttacgaatacccactttcacgatatccatgatctctttgttgctgccccacacgttcaggttgaagtaaacaccgccgctatgaattgtgctgttgccaacatcaagatacgtatcttgactttcgcagataaacagtttgcgtttttcttctccgtatgcgaagtagatactgaacgattccatacgatgacgatcgaccgtgatggtttccactttaacctttggatctttgttcagttcatctaacacaccctgaatgatgtgcagcatgttcggcttgatgatagtcggatgactggtgataactcgatgtgatgtgctcataatttaatcctcaatagttggtacacacataataaaaaagcccctgcgaaaatgcaagggctttttatcagataatgcgtttttcttctaacagcttcgcggtatggttaaccatgcgagcataatcacgggcttctttctttgaatacttgaaccccgcgttgtaactcgccagcgcctttttcaagtcgcctttgtggtaatcaagccagtattccagttcgtgaagtgcgtacttggaaccaccccgaagggtttcgagcttattgattactacgcgtttggaatatgatttatccattcgtgcggacgcgctacgggctgttacttgaaaacaaccataagcatgatgattctttttgcctttccctacgttctcacatgcgcgagactcgatccaggcaatagccgctaaatgatatcccaaacgtttcgatgtttccgattcaactggctttgcagttttgagatcgtattcgttaccgatcctgaaagcgtactccaaaacctttttctgctttggtgtaatatcatccaattccttaacatagctgggggcattggctggcgctttcttcattactgttgcttgttgtagcggtaaagttgacttcacagaagggagtgtttggataaactctcctaacggatcagtcgccgcgttgccagaaaaagagcataagaaaatgctggcagcaaagataattttcttcattgtaatacctatttgtaacaagagagggctatgataccctcgtcttattatttatgcaacgattttacgctgttttgcttcggtcagctttttctcgatgaattcagcaatgttatagtttgaaattgacgcaatcggatcgtacagcgctatgatttcatcaaacgatacccgaaccacatgtttaaagtgaacgctccagctagtcgtaaagatttcgctgttgttgaacccacaatcagggctgaacatggcgcgatattcgtaccctgtgtattctttcaaacggtttgcgctgtgcgcgtcactggtgatcaggaatttcccctggtgagtctcaaccacgaagaaataacccagacgttctttgttgtccagcatcgtttcgaacttgcggttgttatcttcacggtcaacgcgagtttggatcttcttccagacctgttcatattcaggccaatcatgctcgacaacaaccccttttatgggttctttgccttgctctttacgatagcgatcaattttattcactaccgcagagagaagcagtttgtcgctatcacttaacgccgcatcaatatctgcatatttaagcactgcataacgttcttcgcgtttcatactactacatccttatcacagactggacaccggatcacacgatacacatcacgaccgccagtgtaatcagtagataccttttctttgacatcctgcgcagtgtatgacagaacagcaccacaacgacaggtagtttgttttggggtaatgcttacaacttgaaccataataacctcacaagaatagtttcacttcgctaccgcatttcgggcagacgatatgttttttcacgatgtaatcagcagcacggaagaaaccgttgtagaacacttcatttttcttctgtacatcagacaattcatactctaacccacttttgcagttagcgcaaacggtaattagctttggactaacaataacgctgatcatgtatacctcacgaaaaagggggccgaagcccccttaattaaaagttctcttcgacgaatgcagccagtcgcccacgatatacggtatccaggatcacatgacttgaatgaccgtactctttaagtttttcaaccgcatacacaaagccgttgttaacagcagtgttgcgcgggttgtcaatctgtttaatgttcccgcatagtatcagaagggtgttctcaccgcaacgggaaataatggatttgatttcgtgattgctcaagttttgacattcatcaacaatcagaaccgaacctttacccggatcaggatgcccgattgagcgcccacggaagtaatacaggctagggaactggacaacgtttttctccagcagcccttctacatatttgtcaacttccggttgatccttaaacagaatgttcaggctcgtaatacatggttctacagcaggacgcagtttttcgccaagagtaccaggtaagaacccgatttcgcccgacagagggctatctgccttgacatacatcaggtttgcgaagtgtcccgcgtttaccatgtgcattgcaccagcaacagccagcatggttttacctgaacccgccgcgcccatgatggtcacaacgtcattgtttttgtccagaatagcatcaacgaatgacgcttgcagagcatcgcggggctgaattgttttcatcagcttacgctttaacgcttgttcgtgcttaataggcaatacttcaagctgaaactctccagcagcaaccacacgccccacaatctcaccatccgatagaatgtattggttagggtagaaatctgcgtcaggaagcgatgaatacgttataacggcaacaggcccgacatactccaggacttcaacagtttcccagaacagaggcaggtcgatataacctgaatacaacacatcgctatctttcagcgagtcatcgccagtgtattgaagaaccgaacaacctttagacatcgcgatcaacagcatgttaatgtcacgagtcaccagagttgcgccctgctgaatacaagttgcaatgatccgcgcatcctgtttatccagagggaattcttcggtgccgtcataatcgacgattttcagtgttacgctttccggtactgctgggttcgataagtttaacgaaacccctgtttgggtaattgcttcataattttgtcccaggattgctttggacaaaagccggatcgccagtcgtgcttcatgagcggttcgctctttgcttttcaggtgatccagttcttccatcgttgcagcggtgataatgatttcgctgtcaggttcgatgtaagaatagattgaatatgggttactaatcaaaacattggtgtctaatacgtattttgacatacattaaccttatgtggtttcgttaaaaaatgtgccgaaaacctctttcgctttccggtcataaacggcttttgcttcttctggagtggtataataccccaaaaattttctttttccatctatgtttatctgcgctttatacttcccatttgctttgtgataagaaacacctttcaaccccgtactgctgtttgaattacatttctttttcatcgcgttttgttggttcgtcgctttctgtagatttcttgctgtatctccattttcaacaccatacacatgatctacgataggaggaagataaccattctcaacgtaaaacactattcggtgtcgcaaatacatagaacctttaaaatgaatttgggaatactcgttcttgcttccggcttcacttccaggagacatagggccgcgctgaattttccaatacacttttcccgtagatgtatcaacatctacataactcagaagagactcaatcccttgaatctcttcctgtatggttcttgatgaataaccatgacttttcattacatacccaaacggataatatggatatatgggaacgggtgaagatgacttgaacgcatacacaaggtcagcgtttttgccagttcaaaccgttcgtcgatcgtcgtgtcacattcatcgaaaatcaggttgattgcctgatacttgatggtctgaccacgaaagattgtccgcaaatcctgttttttggaaaggaggatcacgttatcatccccgcgatcgataccatttccgattgcttcatccatcgccatttgtttcgtacaagcaacgtagatattcagtgtccctttcgactgcttgatgatatcgaaagccgctttggttttacccgacatccggcccatatccagcgcagtttcgaagatagacacaccgccgcattcttgcccccaacgcccatcaatgattcgcgcaaggtgcaggttacgtgactgctttacagcgtcaacatagaattgtgaaatcatgttgtcgccttatgcaagttcaacgtgtggtgcgtcgataaatttcgtttcaatcggaaggttcggatcgttcttccagttgataccgtaacgcagttttacgccctgttcatcagcggcttgtttcactgcattcaggacaggcaaccacactttcgggttagtctgccagccagcagggagaacgctaggatacagatccacagcatcaccagtgatgtgttttgagttcatggtctgggaaacacccttgcggacgttttcgcgctgttgctctacggtgcgcagaccttcgcgtacaccaaaatcaacaggcgagagttccagagcacgttttaccaccttaaccagttccggcttcacgccttgcaggttgttcaggcttttctgactaaatttaaacatacatacctctttatgaaaataccctatgggctacacagggtatttacggtttaagaggcgcaacgttttacatgtaaccccaaatcgattcttccgcgcgatcgcgtttccagcgaatcgtcatttcaacactctcctgtttgtcatcaggaggaagtttatcattattgatttgttcaatatatgcttgcgcatctgcttcgctacggaacaacgcatggaaattataatggttgcgcccagttacgttacgatcatccagagagaattgacctttattttcccaatcatcatacacagtgattccgttaacaaacagccccagcccacgatgttcacgcgggaagccagtgatgatatgttttcgacccatctgtgccttttcaccagtgatactgattacttcgtacaggattgcgccaggtttgatatctttcaggacagcacgtttttcaaaagcgttcataatgtattcctcacaattagttttcatatacagattaccacaatctgttttgatgtcaacaaggtctatcgtttttatttgggaaagttaacgtgaaaagacgatcgtgtaatgcttcgatccgttcatacgcttgtttcaggatcgtcttatcttctgggttcgttgtctcgatgcagatcagttcgtccgagtcgatagcgatcacatcatccatcagtgaagcgaatacgttcacgtcagggtgagtcaattcctttatctccgcttccatcccgtcatgctgggataacagttcgatgatatcgcgctgtaaatctccctggtacgggaatccggtttgaagatggttgataattctttctgctttggtcatatttcacctacaaaaaagcccctttcggggctgggattaaatgtctttgcactggcaaacaccgtatttggtgaaaggcttgtcaccgctcaggtaagaccagaaatcgcaagcctgttcagcggtttcgaagattgcagcatcatagaagccgtgttcttcgttaccatctttattgaggaacacaggaagccagctttgcggtttgaagcagtcagtaacaactacccaaccttctttcgctttcattgcttctttgttcgcttcaaccatttccagcatttcgttcagtaagttcattttaatccccttgtttatctgtttcgttgtctacgagagagatattatcacaacggggattagtgtcaacagttattcgaaacgaattgtgctatttttgaaaaacattccagagcacacagatcctttgatctgcttgccgttcacaccagttgcttcgaatccggttgagtatgtgtctttttcagaacatgcaaaccacttgtaacccgtgaactggatgttcgtataaccctgtgcttccaggatacgctgtgcctctttctcgtcagtacagcttgactgcaagaacacaacaacgacaaccatcaaaatacacacaacaattttccacataatttatactcttttaaggttagttttacaggcttcaatccagcctgaatagaacggggagaagtcctccgctacacccaaacaaacagtagtgtgcttgaatgggttcggtgttgtgattttactattgggattgatcggaagttcactagccccaacactggtcgcaaacaccataccaccagttacgtaaatgctttgaatatgaccgtaagaatcgccaggccacttgaaacggtattcagtgttccataccttgacgttgtacacatcatattcatcgaacagaggatcgttgccctttgtcgcgttgtaaagcgcaccgcgccattcatacagctttgcttcgatgtcgctaacattgatctctttacccgcgctcaaatcatcaagcactttttcaagggttcggattgcaccgctaagttcattagttaacatagagtttcctttaaagtctttccagcatatcaggcccgaatgccataacaaaagaacccctcaacgcttgccactttttatggaggcgcttaggtacgtttacttgcaaacgatccattttacgaataagttctaatgcatcgttgcttgtgatttcattgtaacctagatttattgttgcgatcccatatctaaacgccattccagcttcggtatttccaacaaaaacagaggctttcatttcatcaaaagattgttcaaacatgagatcagttcctttaaattggtttaatggttttcaggtatagtttagcataagaagaaccaaatgagttaccattatgatcaaacttatgttcttcactcttccagtatttccccgatttcatcaagggtatacgcttcttacctgctgttatcgtttcaaccattccggtatgtgtaaaaatcatacaaatccctcttcttcgagcacttcccagatcaaacgatccaggtgcatcaggttccacataacggagtcatacgaacccagcgagcgggagtaaatcactccccatgaacgatacgccttttggaatgattcagcactgttttcatcgtgcggcatatcgtcacccgaagcgatcagcagtttcagaaccatcagactattgagcgcctttggcgtgaattcctgttcgctcaacttcgtcgcgtaccgttcgatgattgcgattgacttcggatctttaatacgcccatctgtacgacgcgttttaaacgcgctcattaattcatcgactacggcggtacacttcatatgcttcatccttttcctgtgcagacatccgattatagcggatctcttcgcgctgttcaacttctctcacggcttcggctttcttttcagcggtcagtatgtgatgtactacagcgtttcggatttcccagagatatccaatcatctgcatatcttcaacggtatgatatcctttcatatcacattcaaatacaatttcatcgcgttctgccattgctaattgtgcagtagaaggacaaataaccattccagagtatttttcaatcaacgattccagtgtacgcggttttactggaatgtcaaccgttaccggaaccattcgcatcgttgaatcattatgggattgataaatcatcagaatgtgatctcctcaaactgcattctacgctcaatcgcatggatagcgttatcacgctgttctttgttttcatatccagcccaggtaatcggggttgaacagatcagatgaaaagtgattgctgggtgtctcttcccttcaacaacgattgttgcatcatcttcgatccatgttacgtgatccagattcaccggatagtttcttacggtagctgtttcgccaaccaaaggcgacacatccagaatatcacgatcacgaacatatgatttaatacgagatacgattaacattatttcaactccactgcatatacatcggtttcaggggctttgtgtacgcgcatatctttaccacataccgcataagccggacagttacgacaaccgttatgatccttgttgcccgtcaattctttacggaactgttttgttttcgggtgttcccagatatccttcacaaaatcttcggcttccagaacatccagaccttcttcccagccaccttcaacccagcgttcggtaaacgagcaagggaagaactgaccacgttcattgatgtaagagctaaacatcgtcgcttcacagtcttcggcgtattgcttgtactgttcgaagttcgggtgtccctccatcgcttcaacgaaagcgggggctgaacagctatcgaatccaaatcctacaccagaatcgaggcaatattcaacaagttttttatattgttcgcgggtaactgtgtcccagttcttaccgcgtcccttttgtttcagtcccaggaacacgatcgcgtttacttgtttcaggcgcggatcattcttcacagcgtcaaccacgttaaacgcatcatcataggttttcgagctaaccatgaagtgaaggttgatttgctgttgtccggcttctgtcaggttcgctactgagtcgaaagcgacatcaaaaccagcgtgtttataaaccgataccgcaacagccccagcaaccgccgctaaacgcgctgcaacgtcttttgatacgtcagcaatggtaaggttcggcacaatgcctttagaacgcgcatacgccatcatatcgaacatatcagggttcgttacaccttgtgcatcagcaccgagggcgcattgagtcagccagggcattttgtcgatgattttcttgaagctggcaagatccatgttgaacccgttagggttattggacttgtagcagaacccgcagagtttacccgctggcccgttgcatttggtagtgatctcaatatcgagaatttcggggaatggtgcatattctggatcgtggtcgaaggtatgcccccaacgagcgaactcaccagattcaacgttgaaatcatagttgtaacctttagagcgagcgtgacgcatcttgcctttctggaagatcatcagactaggggctttggtaacaatgctcgaagaatcaaacagatgatcggcaatcttattcataatataattctcaaaatttaacatgggattggaagacagcgcgagcaaggctttcattgtcgaacggtatcgactggtgttgcgctttgctgtcaatgttaacgcgccagaactcactcgaaccgtttttcgtggagtaatgcaacagcgttaccgtcttattcttttccaggaaggtacgtttgtcaatctctgttttgatttcgtgctgcatcattttacactccgtttcagtttgcgttcgtcagccagttcttttttgtaggttttgatgtacttcccgttaaggatgcgaagctgttggaaaactttgttacacaaagcacgttttgctttgtattccggcgtattgcggattgattcgatcgtcatccccatttcgtttttagggtatgcgctcaactccgcgccgatctctctgtaccagttgcttaactgatcacgctgtgctttgtactcttcaaaagttaacattataactgatctccgtaatctttcgctgcatcttcgggggttgcatccagtcgataaagctcaacggctaatggactgggtttgatttcgcggttcaggatctcactgataccgcgaaggaattcgatataaggacggaatctcatttgatacgtaccgcgttaaaagcctggttgcgcagttcataagcctgttcaagctgttctgtagtgaacagaggactatcggtgttagtggtgaaactacaaatggttttgttgtcggcgttaacttcttcaacaacgatttcataaccccagatcccgctgtactcacatttcacgttacggtacttgatgtaaaccgcagcaacatcttcttttttgtagttccggcttttgtagatgatttccatgatatcctccttcgtttcgatgtgtgtacaataacagatcagggttatggagttttagcaattcgtgctaattatgccattttcttagcgattttccatgcggctttgaacgctggaacatcttcaacatcaacccagaaaccagaaccgaaaccatcgttgtagcaagggcaaccgtcgcagtagttttcccaggtcatcactttaccaccaacagaagcaccagtttccatcgcacgtaatgcattttcaaccttttccagtttttctgcgttgtcgtcataaatgatgaagtaccatttgccgttgtattcgttaccaagtttgattgcttcgcgaacaagtttcatgatgatttcctttttgtctgtttcgtttcgatgtgtgtaatataacaaaacccctcaccatagacaaggggtttctttaacaaaaagtgctatttaatagtatccaggatctttgaagtgtgctttcatatatcgcagaatttcacgcaacatctgggtttgctcatgtccacgctgtgaagccatatcgatcatgatgcgagtcatttcgacgttctccaagctggttatacgctgttttaaggctgtgttttcctcttccaactcaaccatacggtcatatgctttgatgcgctccaaaggcatatcagggcgctgtttgaggacacgggcgcgtgacacttcgcattcgtgatttgctttccagtgatcacgttcaccagcaattttatcattctcctggtgtagacgtacaatctctttaaggaggcgttcagtggtatcgggatcaaacgaaaccatgtattgcatcagggattgcaaccacagatcctcttgtacctcctgtaacgctttaggcccaataatggtaaactcgcgtttcttcatgttgctaccgcaaccgtagttaacgttacccgcaatcgaacctggttgattagtaccatcccatttgtcaccgataacaggttttacttgctgaatagcacgattcagcatttcgaattcttcatctaaaatcatttcatatcccataattcatattgtgagcgaaggatagcgtaaaggctaccgatatggattgtgtctaccggacactggaaaagatccccgcgcatcatgttaaactcgatatcgttacgttcaacatagttaccgatcattgatgtccaacccatcaccaggttataaccatcttctgataacccataagccagcctaaccatgatacaacgcttatcagccagttctacgcgcatatgggtactggtatgagtgaccttgttcgggaatctgcgaaacattttagtaaggagtttggcggtttcaatattgaacgccagttcttgatccttactggtctggttgtcatgacggagattcagatacttttccatttttgggttgagattcacatgttgcataatatattcctcacaggtttaaagcgttcttttccggttccattacatgaactgcatttcggagatcggtcgctatcatatctcccagatccattacatgcaacacatttccgtaatttccagccatacacgaaccgcatataataatcggttcgtgcggccttgcgttcgtggaagttcatactttgttgtaaacctgaacaacccacatttcgatgttcggtgagtaagtaacgttcaccatcggcatagtgcggtatttgtatgcggctttgtacgcatcgagttcagtcggaacacagaaagagaaaccgttgtcataacgttctgcgttagaaacttcacaaccaactacagaagcaatgtttttgttcatgttcatgatgttttcctttctctgtttcgtttcgatgtgtgtaatataacaaagcccctgcattgctgcaagggctttttcactttaatcgaatttttctggcaactggtctacaagtgcttgagtttgatgaagttcttcactcaatttatcacgataatgaaccaattcgcgggttcttgatgcggaatagctaatgagtttatcagcggtagcggtgtaaccgtaaccagcacacgcgatttccagttttgcgttatcgccgttaggtacgcggatatgagcatacgccagcaagtttttaaccgcttgcaacagttcatgatcttctttgccgatgataaactggtttggttctgctgaatccatatacagttcttcgtctttgttcattttgcagccttatacatttcaaggacgcggttcatatgctcttgtgattgaggcacacccgcgaagttcagtttgatgaagaattccagacgatcctttttggtgcattcatccagccccagggcaggtaatgaaatgttttcaaaggctcgctgttcgtgtcgtggcatttcgtcccagaacaaacgggaaccgtccggcataggaatcccaatttcaccttcgtagactttgataatcgtcgtcaggcgttgtttaccgtcgatgacttctacccagtgagtttcgttgaactggctatcaaccgcgatcgcgatgataccgcaagggaaaccactgatcagggtagtcagaaacgcatcttgctctttctgcgtccacacataggggcgctgataagatggattcagatccagatctttattcttccaccaatgcagataactcccaaccatgatcgcgtgatcgcgactgcgaaaagttaactgatcgcggatacggttatgaaccggaatatcatctttagacatgattcaccacccaacccaacaaaccagtattgatagccgcaacggtaaggcaaatcacagccaacacccgcgcgttatgaactttagttttcagttctgcgatctcctgatccttttcactttcgaactcgtcgcgggttccatagtaaccaggatcagcagcggttgcgatacgcactttgtctgtttcgaataatgttgattttccatgatccggcccaaccacacccagaataccatcacggtcggtattgacaattccatgcgttccggctttggcaaacttaccatccttaacggttactacacgatcgccagctttgtaagtcataatataatcactctttcacgttttgttgtaagaactctaacagctttccttcggcctgtaaagcataaagtttattcaactttgcgatgttttcaaagtctgatttttcgctgaacgaccagaccccatcatcggaaaccagcgcaccgattgatacgccagtttcaggatcacgcgtcaacgccagccccaggggatgcaggatatctttattgattttccaaatcagccccaattgagataaggtgttgaaatcaacgtgactcatttaggcaatgccccgaaagacagcagccccatacgatgatcgttatctgattcaccagtgctgaattcaaattcttcaccgctgatactgatagcgcggaaaccgtctttcaggtatggcaacagatacagagggatcagcatcatgtttgaatcgtcgctccacttacggaagcccagatttttcatttcttccagcgtcaaatcattcggatcgacgggttcgaaatcaggggaagcgtaaaggcgtccaggcagatcgcgaatatttttcacggtgaatgaatcaccccatgactgatacgcgataggttcagcggcgcgggttgcggtagccagaaggatcatttggcagatttggaaagttgttgctttcatgatgtatatcccacaagtttagtcagtaaattccccatagtcttacgcgcatgatcgcggatctggctatacggaacatatttgaagtcatccatttcagtaatggttcgaccatttttaacgaaggttgaagcacaaacacatttttctgcttcggggtaattattacccacatatacgaataacacaagctcttttttactcgtataatcaatcagacccaggctcaacagttcgtgttgttcaactacaacgcccgtttcctcgaagcattcacggatagcagcattgatcggggattcgcctttttcgatatgcccctttgggatgtcccaatgaggcgtttcggttgcgtggcccattaaaacgctgccgttattcaggaagagaataccagcagaccgttccattactgtgctccgaacttacgatcgtatgctgccagcgctttatctgctgcatcaactgcctgagtgtgtttgttagcggatttctcgctgaacacttcgcggtaaatggcaacccagagggatcggcgggtctgttcgctttcttcattgacgcgagaagccgcaaaagcgttatgttctttgatcagttgtgcgaattcagcatcatgatcaatggtttgttgttgaatagctgtagaagtcataattcacctatttctttcagttcagttttgagtttttcgagggttgattggtactgaatgccgttcacaatgtcgttgcgtcgggcataatacagcgtaccagttttgtttatctctgccaacacttctttatcgagtttatcaggttcattgctaaatgcaatcctgaacatttcttcggcgttcggcgcgaatccgttacagaacgtgataccgagtttcggatcgaagaatatcagggatactttattcactttttccataatgttcttcgtaatcctcgcattctgggagataggtttcgcagaacatacacagcgtgaagaatgtaggctggcgaattccgatattatcgggtaagtacatccagaacgtgttagcaaacacgatgaacgttttcaggttttcaacggttacggtactgataccgtcataaccggattgagtaattgcgcgttccaggggaacagggtattgctcgcagtagttggcgtaatgttcgcttgtcaccagcgcattagccgcttttacgagatcggtaattttcattcaatatatccccaacgaatttttacgttatcttctgacgtcggacttgtaggagtcgggtacggatagctttgcgcttcccacagataaacaacagcatgttttgtcaattcttcgataacttcatcgaaagtaccgacactggtttgtaaaggcaacgagaaaggtttatcgttggtttctacttgagcgattggcccatctaccaagataacacgaaccgttgtgtgctcagacatatgagcatagattttgtttttcatgcgggtacatattccactttgacaggttttgcgataaggcgttctttagtgaagccttgcccgttacagatatcacaaacgtaactgatatcttccatctgatcaacccatccagaatccggcaagccagaaggatatgtgttgacacgtttgacttcaaaccctttaccttcgcatttagggcatacgtgcggatacttcgctttcagttctttggagatctgacgcaaagttttctcgccgccgaacacagcacacaattgctgtaaatcagggattcgaagatcggcgggagtaatcacactaaatttcttcatcatatatttctcacttaaagaattttttaatgaaagagaggaacaatccaccactgaacatgatccagtatcccgcgccgtcaccgttaaacaggacatacacagcgacaccatagcaaaagatttccgcgatattcagtaagtttctcataactccctcctttgtctacaccaggtattttaccagaaagtagattactgtcaacaacaaagttttatcaacccacttatcaccagtcattagtaatcccctacaggttgagaagatgcaacgctcagtatacggaaagagcattcattccatttgcaataagttttcgcacagtgaacagtgcctttcattacaaacccgtttgagaacaccagccagtaaagtttcatgattgcctcctttgtttcgacacccctaatataacaaaagcccctgcacgaatgcaagggcttttttcaaatatttttcaacatgtgtagttgaggcggacaatcttttgaagcaatcaggcgatccaggcgtgacataacgcgtctgtagccgtcatactcgaacttgattttaggtgcgatgcaatttacatgtatcgcgtttcgcgtgttcaggctcaatgtatactcagggataacggttcggaatcgtacagcaatcactggtttttcgtgagcaacagaatcatccatgttttcgaacatctggacggtaaacgcacaggcaaaaactttgccattaatccggcgatatgcaatgacttcctgcataccttcgtttttcgctttcaccgcgtaatgcagaacgttacacgaataatgattagcgagactattaagaatttcactgtagatcgcaaagtctttttttgactgacgcggaacgatccaggaatcggtctgcgatgtgatctgtagtcattgaaacctttgtcacataccaatcacttaacgatttactgaaattttggttaacttctctgcgtaagttattgataacatacatcaatcgtgctctgttcataaatcacccattatatttgaaatactcaatctggcgcagacgtttttccgctgcctctttcgaatcatattcaccaagttctttcgtgcgatcgtggttcagtacaacccacttatcgccgcgatgttcgatgtgctccgtgatgtcttcgactttcttatccagatccagcggttcagcatcttcctggatgatagtcaaatctacgggcaatgtcaacagtcttttaactccgctgatatcttcgatgcgggaatcatacgcgagggttacatgtggtttgtaatcgtcataatcgtatgttgctccagcatccattgcatctttgaagcggctatggagataatcagactccagaacgcccacgatcgtattaccgtatttcgtttcccacttctccacgtcaaccagtcgggcaggttcagagataccggatgcagggaacagatcaaccgtcttacggctatacacaatcgttgtatgcagctttgcagcggaaacaggattctctacacccagaagtttttgcaccttcgcgagcgcttcacaggaagcctgatcgaacttcgcacacatatagatccccgaatcaactacgggtttcgctacttcaagaaaacttttcatgtgtactccaaatgaaaaaggggctttcgcccccagtggttaaacgcctaagcgttaattatgcttttgatgcatcaatcgcttcattatcaccagcgatttctactgttgctggcagaagtgctttgatcgcgccgatcagggcatcaggggatacaccctgcgaaccgtcgatttccagaagaccgcaaatctggcctacgagttgacggtgatttgccagttcttgttctttaccctgaatgatttcgttcaggtcgaatacacgggctttcaggatcaggacatcgttttgaagctgttgggtttggttttgttcagtcattgtttacactcttaaaagattgaatacattaagcacgttacgtttcaaatcgtctaacgtaccattatttaggattgtataatcagtcaagccaggtgtcaaaccttgctccgttgaatgattatcttcaataccagtttcacgttcaaggaacacaaagcgagtcccgaacttgctcaggtatttatattcgtgcggttgacgcacatcggtaatgataaagtgatccgcgcaggatttcaacattttttgaatagcaattgaagtccatatagacggatctattttacaaacaatatcagtcccgaacacctgcatcaaacggcgaatcgtccagggctggctgttttcttcgcaaattttatgagcgataacatctgcgttactcatgaagaacccgcgagaacttaattttttgataccgctagaaaacagcgtgtatgcatcgttattggacatcaccagcggggcttcacgatcaccctcatagaatgggttcttcgctgccagcgctcgcaattgcgtgttatcgtgatgttccatagaacgtttcaggatagctttgatttcgtcggctaacgcgataacttcaacattgcggaagttatgcacaaccatttgagcaacggtatctttacccgttcgctttttaccacaaataccataaatcatttttgcgttttccgtggagtaggcacgatcacccgtccgtcgatctcaatttccatgtgagcgaagttgaacatcgtcatacaggatacggcttcatccgaatcattggtatacataagctcaagctctccgaggttggagggccaagcgccatagaagcgaaatgtcgctacagtttttgactgcgagttatccaggatatgcaaagccattgcctgttgtggttcactccaacgcacggaatcgaaggtgttaaaatcgacagtaccgagcatccaaaggtaaaccccaagatacgatcgcagttcttcatcaacagcaaaacgaatagtcagtggatcgaactccattgcagatcctgggatcttccctcgaatcattgggttcagtgggacatccgtaattggaatgttgatagcaggtagtgtaacaccctgaacttgtagtttcaacccttttacataatcattgtcaggaatatctaacatgaagttagtaggtgaaatctggttcaggatcatagcagttgtattcatgatgatctccattttatagatatttagatcaagaccgtgagcgaagcgaacacacgaacgaagtgagtgttatgtacgatgtactgtttataatatttatattttatatatagagaaaacagtacatttccgtatactttttatacaatcgttaactatccgtcttcgcttcgcttgacggaactcgcttcgctcgcgatctaatttttagttgatctattcaataaataggtatactatacctatactttcaaaagagattgaaaacatgaaatcattcaaagaactactttctgaatctgttcagaacaaaaaatttgctaagaccgttgatctggttgaccgtggtaacgctgcaaaaggtcagatcggtttcctgcattttgcacatggtgctgattacgatgtgtatgcgccggactcccacgatctcgcttacttcggtaaaggtgttgtccgcctgaaaggtaaaaccactggcaagactcaggcagcgtatattgactgggcgaaaggcactgtttcattctacagcggtgatcctgctgatgacctgaaatttgacaagccactgaaattcaaaggcgcttccctgtacaaagaagccgaagaaaacctggatctgtacaatcagttggcggaagatttcgagattgatctgcctctggatgaagcattggtgaaaggaaaggtgtataagctcccaagtaacgatatgtgcttgctgtataccggacgtaccaaaaccaaagctacaggcgaatacgccgtgtttacggttgtagatgcctctggtaagcctcgtctggtatcgggtaaacgctttacccaggaatacaaagttgatgttctgtctaaactggttctagctgaatcagaagatttgaacgaagccgctaaaggtattcgcgaaaaagttattgcggtgttggtgaaacgtgggtttaacgaaaaagacgcagaaaagatggttgataaaaacctgaaagatgcgatgaaggttcgacctggcgcaacccctggcaaactcgcggaaatcgtgagtatcctgtaaaaataaagccccttcctttcggttggggcttttttgttaatatctgttccaaactttcttcgcgctgtatggttttcctttggactggaaagcctgtgtaggcaaccaaactgctttcgcccaatcttttggggcgatctctgcaagtggtgaacgtagatgggctggcaggtaggctttgatcatttgatcagccccgcgcattcccttcacgttgttccaattgattttcagtctggttttgttagaaagtcgatctgttgatccgtagccacgtttcaggagttcttctaaaaactcttgacgtgctcgcggtggcgcatagtgcaagttcagcccgtaaagaaccaagttacccgctttcgaacgtcctgaacccaggaaaatgattagcgggaaccgatcccagtatggcagggtgtctttgtatttcgcatcgtagatgaacgtatacaaacgacccgttgctggtttcgcaaccctgtgcgtcttaatgctggttttgatgaaatcaccaaaccaatcggtcgaatctttctgacgtttcgcagcggttacaccaacagtcattttcttcaaactgttgcggaaatcgtttacgatatcaaccgcgtgttttttgcgatagtcattacgtttgcgtcgggcttcggtttctgctgtacggcgttcgatttcatcatcaatctgctgcttatagcggtgcatagactttgtgaacgttgcgtatgcaatcccgttttcgtccgcgaactttttggctgtcatgccttttaattttgcgcgtcggaatttgataccaagttcaacccattcacccagctttcgctttggtggcggttttggcttgtcttcttctgcgatgatctcgaactcaaaaataaaactcataattccctccgtttagggtatttattgccctttccatccgaacacacgtttcaacgtgtcctctgtgatgatcttgaactcccagcctttttgtttagctgctgcattagctgctttccatttgtcgatgtttactgcatatgtatacagtgcatcaacgaatttctttttgttgtgaacgttgttgttcgctggcttaggtgggggcaacgtttctttcatcggtttgacttcccaaaggtaggtcacgccgttatccatttcgacatagaaatccatgaagtaacgccgtcgctttccgtctgcgttgctgaaataagggatcacaacctcttcactgttccagcgtttcacatgcgggtttctgtcaagccagttcataatatatttttcccagcttgacctatacgttatctttcgcggatctcccttatatttctgtatgttctggggcataaaagaccccttgtatgtctgtcttccagccattttagatcctaaatatagtaaacattagataggggaaattacaatgttattttcgttctttccaccagttgattacaaaggcacaccaactactgatatctaccgcgattatcgtttttactttaaccgcgtgatcaggaattataagccgcgtacatatcaactgacaggttcattaagacccgaacaattagcggaaacgctatacggaaaccagcaatactactgggttatcctgatgcttaacgataattacgatccgttttacggatggattaccgatcaggaaacggcttatcaatgcgctatccagcgttattcaaaagcaggtggtgaacaagttctttatcatatggatggtaagggcaaccgttattacaatttggttgaagacccgaacaatcccggtcattggtatgacaaaggcgataagaacatgcgttatttgcagtaccagggaacattagtccctgtagatatttatgaagatgcggtgcttcaaaatgaagcaaaacgaaccatcaagattattaacccctctgatattcaatcgttcgtaagcgattatatcaaggaaatggaaaaggcgaatctatgaaattcggtggaaatatgcattcccctttctttgagggggtggtcgaaaacgttgatgatcctcgtctactggggcgtgttcaggtgcgtgtatttggtgagcatccggcacagaaacaaaaatctgaaactatcggtattccggttgaggaattgccgtggatgatgcctattcaggatattcgcagcgccgctatttccggtgttggtttttctcctactggtatcacgcgcggtagtttcgttatcggttactggcgcgataaatggcaccaggacggcgttatactgggaacctttgctggtgagtaccgagagaaaccggacacccagaaaggcttctgtgacccgtttggtgagtatcctcgttatgtaggtaacgatgtcaacgtactggctcgcggtggcgcagaaggacgcggttcttcaagcgtgattattcgtgatgctaacagttcgttagctgtcaatccagacgatcgcccattggacgagatccccgaagataaccgacctgatactggtgggtttacgatagaaaaaatgatccgtggtgatgaaggtattagattgacgtggtattatgatgttaaaggttataccatcgggatcggacactttttcttaaccgcaccacaaggaacagacccagcagttgttaacgctgcgttatctaaacaaattggcagaacggttactggtgttcctggatcaatcactgctgatgaagcgagtgttttatttcagcaggatttagctaaagttcataacgatattcagaataatagcaaagttcgcgaagtgtatgtgacgttaaaccgtcctcgtcaaatggctattgaaaatatgtgcttccagatgggtgttggtggtgtcgccaaatttacgaatgctcttgctgctatgaagcgtcaagactggcaaaccgcttacaacgaactgcgaaactctacatgggctaaccagacgccaggacgttcttcacgcgtatctaaaatcgtgctgacgggcaaccttgaatcatacggtgttcaggttccagatccagaagggcgttcattgagtgctgcttataatgcggtggttctgcaagcaagcaacccagaagatccttttgttcctggtgatacccgcgtaatgttcgaggaacctaaatcggcatacgctgctgcatatccatacaacatggtattcgaatcccgttctggacacattcaggaattcgacgacaccccaggctttgagcgttacaaccgcgttcacccagcaggatcatacgaagaaattcgtcctgatggaacccgtgttgttaaaatcgttggtgatgattatcaaatcgtcatgcaaggccgtaaattaaacgttaagggtaatttgcaggttgttatcgagggtgatgcgttcatttacaatatgggtaacgttcaacagaccgttgatggtaacgtgaccgagttcgtgcgcggtaacgtgaatcaaaccgttgaaggtgaatatgtggggctgattaaaggcaacgcagaattaaccgttgaaaaagatgcaaccgtaaacgtgaatcagaatttaatggctaacgttaaacagaatgcaaccgttgccgtaacagaagatgcaacaattaccgcaaaaaatgctctgattgatattgagcaagatttggatattggcgcacgtaatatcaacatgcgagcatcgaataatactttcattgattccggcgcactgactaagatcactggcggtactgtacaggtaggctaaaaatgatcatggattatgaaaccatcattgatgggattatgcaaaactttcagcatccttgcgatgctgagatccccgctggatattacagacgcgttatctggcagggacacacagaaaattaccccgctgttggggtagaatgggcgaccgaaatcatcccgatcggaactcacctgtatacgagttcccctttcgggcagaaaagcgatccgcttccggtggtgaactctccaaacgtacccacaaatccagatggaagccctggagtttctactgacattttggttacgaagattggttattatttcgccactcaagcggatattgatgcctatatcgaatctatcggggctactaagctcgcgggtaatgactggtatggggcggatctgtcaaaagcgaatctgttcaagaaccctggcgaactcgcgatgtacaaggtggaaaactccggtggttatttgctgacttctggcccccgttgcgatcagcgaatccgacaggtatacaatcagactacaggcgcgtttaccagcattgattattactggaatggtaatcgtattgcgtacatgaaacacgacgaatcccccgcgcaccagtgcaaatatacagggatgtcagtaaacacgaacgcagataccagcattcctccggttcctcctgctctcccgtcaacgtatggggcgctaccgagtgaagccagattgttttctgctcgctctggattgggctgtattccggcgaccgtagggttcccgtatacgaatatcagcgatgctatgctttccgcgtggaacgagactcgtaaaacgttcaaactggctttcgatatgctgacgggtacgattaagaacggtacgggtattgcgacgatgtttgacgggctttcgatcgggatggaagaaatcacagcgggtgctctggcattgtcgcagcaagcatggcaaaccgcaatgaaagtattccgacagatcattagctctgcgtttaacatcgtgggcggggcgtgggatttgatcaagaatttcctcccgactgttgcgatcatgggtgttgcgatcaacatttacgatctggtgtttggtgatagttcggttcaatccctgaaagattctttccaggctctgattgattccggcgcacaaacgtatgaaagcgtcataaacgcaatctacggggctataggcagttcttacaactacgccgttgaatatgtcaaggctggcgctcgcgaccttgtagacgcttgtagcgcgttatttgactggtgtttgacgatgttccaaaacggttgcgttgctctggtggatttgtacgggcgtatgatgcagatctggtcaatgcctcctgaaacaccaaacccgctttggtctgcggtgctggctattcgaaacatcatgaaacagattaaacctcttgatgtgattctgggcggtaacttcccagggtttacagcaatggatctgtatcagcaagcgcaagcgaaggtgaaagcgttcattgatgcatcctatgcgcagatctccgcattgtatgatcaggggcaagaactattcaacaccctgaaatcacagacacaggaaagggattcgattaaacgcaagttcgatcagtacctaaactggatgtgggaacctgtaacggaagcaacaaccgctgcttatcaggctgcacttgattccgctaacgctgctgtgaatgcgactaaggccgcatatgaaggaatcaaagcacagattgcgactctgcaagatgggatgaaagatacctacagcatggcgatggacgaactcaagaaactgcctgtaatggctcagattaaccagttcttaggttactgtggggttgcattcgatggcctgttaaaaacgtatgagaacgcgctgacgggcgcacaatcgctatataaaaactttgttgacagttcccgctcgtttaaggacacatgcaaggtgatatataaccagatttgtacgcttgctctaagtaaggtaactcaatacgtaaacaaattactgtcattaatcggactcgcgatcacattcggttcaattagtgtttgcgtccctatggttcaatactaaatacccgataacgaggggtaataatggctactacaaagaaacaaattaatcagatccccgatatttttgtcggggctacttttgacgaaatcaaatctgacttaatcaactggctccgaggtcaggacgaattcaaggattatgatttctccggctcgcgcatgaacgtacttgtggatctgttatcatactgtacactgtacattcagcaaatgagtaacaccgcactgttcgaatcgtttattcgtaccgctgcattgcgtagttctgttgttcaacaggctcaggatttgggctatatgccggactcccgcaccgctgcaaatacttcgatcctgatcactgcgaaaaacccactgaacccaacatcgatccgtattccacgcggtacgaaattcatcggtacggtgaaagaaacaaacagtttcccgttcgtcgtatccgatgacgtggtgatcgttcgtgacaaaaacaataactatgtttcgatgttgaacatcgttcaggggcgtttagtacgtaccgaagtcatctttgatggttcgactatcctgatccgcgatccaaacatcgaccgtagccaggttcgcgttaccgtcaacggcgcacaatgggatgactggacaaacgaaagtatcgtaaactcaacgggtgcatcaactgttttttatatgcgtgaaactgttgatggacataccgaagtttactttggtgaaggtgaaaccagccaacaggtcgcgggtggtgctctgactgctgattacatcgggggcttgaaacctgcaaacggttcaaccgttgttattgaatatatttcaaccaacggcgaagaagcaaacggcgctgaaaactttgtttacgtggatacgttgacaaacattagcattacgagtattgttgagaacccgactaattcagcggactatgtaggcgctgatggtggtggtgaaccggaagatatcgaacgtattcgtgaactcgcgcctattatgcgtgagacacagcgccgttgtgttactgcatcggattatgaatcgttcctgtctcaccgtttcggttctgttattcaggcggttcagtgctttactgataaagaaaaacctggctatgcgttcatcgctgttaaaccgaaatcagggttgcgcttaacctctgttcaaaaagaggacatgcaaaactatctggcgaagtataacctggcgactattacgccgtcgatccttgacccgaactacctgtatattgtacaaagcgttaaagtaacgtatgatatcagtaagttgatcgagtctgaggaatggttgcgtggtcaagtaatcaatgaaattgacagatactacacagataacgttgaaattttcaacaaatctttcagtaaatccaagatgttgacttatgttgataacgcggacgtgtcgatcattggttcttctgcgactattcagctattgcgtgaactggataactattacagcgccccgatgtctggtattcacttcttaaaccaggtgaaatcacgttctgttgtttcgaatgggttcaagtacacaaatgctgctggtgattcgtatgatgtgcgctatgcgtcaacagatatgaacaccacgaccggactcgcgaaaatggttatcgggccattcaaaaacggtgatatcggtatcgcagcctatacaggaaacgattttgataaatatcctggagtaaccgatcgtgataaatattacgaagtcggctatgtggaacattttaatgatttcattagtttcgatcttggtgtcctgaacgttccatccgagcgattcagcgctgcttacatcgaactgactggtacacctctggaagagaacattttcacccgtgatggttctctgattgtatttgaaaacgatctacgtcctcaatatacaacgttgacgatgaatccaatcagtcaataatttacaacccctgtcatttggcaggggttttttgtttgctaaatatgggatataagtaaaacgcaaatttggagaaacatatgattaaagcgccgtcaattaccagtttgcgcgttgataaactggctgctaacttcgtttatttgaagtgggatagcgtcggcatggatttttactatgtcgtggaaatggcagaaactcgcggggtaggtggtgtaactattccagatgaagatttaacctggttccagttgggttatgcttatgtaaacgaatggttttcttccgatgttcagcccaacaatttttacaagttccgcgtcatggttacgcacaagggctttgaaccgtctgactgggtttatacagatgaactctggacgtttacccttaacgcttacgcatattcaaccatgcgtgaatttacgccaagcgatgcattcataaacgagaaattcgcaaaaaataatcagaactacgttaactttaatacagatgtggtaatggcagcgttgatgaaagaagactttgtgttttctccactttacactgacgtatcccagatcagcgataaaattcttacacaagaaagctatcatgagatccaggatcatattgaacacgtttgtaacgacattaacagaactttcctggtagcgtcaaacggtttgttgtacctgtttgaacgttttcagaacatggcgaaggtgtcaaacgacaaagggcagacatggcattactacaaggcgtttaacgaccgcgtaggaaaccctgtatcgcgctctgttgcgtaccaaagccgaaacacaacctatgtactgggttacgatcgtatcttctacgggcgcacctcaacggatattcgctggtctgcggacgatgtgcgattctctgctgatgacgttacgtttgctaaactggggaaccagacgggcttagatttcgacgtagactcatataacacgtttgctaaacttcctggtaacgtgtcgaagtatgccgaagcaatggcatgttccgatgactggctctatgtggtggcaaaaaacgttctgcgtcgtatcgcgctgaaacaaacaccgattgacaccgatccgagttctccaacgttcggggaaaagattttcgacactgacagctatactgttgtccctggaaatgataagatcgttgttaagaaaatggatgtaatggacggtattctgtatgcactcgttacgggtgaggtgaaaaccgctctgcaagatcctacaaaacccgctaacgtggttccgtccgctgatgctggtgtgtatcaatggcaagaagacacgaaaacctttgtgcgcctgtacgggaacaccgaggaagaacgtttttatatccaacatgaatacaccaatatgtcaacgaacggtacagagattttcatttctgtagcgaactacaaatatccagggacacttcccgatcctgaattactgatcgagaatcctcaactggtcgatgcagtgaaatatgatttgcgtcctggctataccgccagccttgcaattaactttgcgacgatccgcgctcatattgacgatccgactgtatggaaatttggtgcgcaggaatattacaacgaggcgaattatagctggttcttccgcgactctgtgcgcacatggatcaccaatgataaccgtcctctggtagtatatccgaaaatcacttacagccttgtaaccgatagtgctggcccttcgtcaacgcttcgtgtgaacaaagaggtatgggatcgcggacacgttacgatttacatcaacaacattaaatttaccggattcacgaagtatacgaacggtgtgttgctgtataagagttcaggcgaaatcatcgggttctttgaattgagttaccgcgcccgtgatagcttaacgattttctggaaaccagataacacgttgctgattgccgatctgattcagcaggaacgcgaaaaaccgtatacaccggatctgtcacctggtttgattgacccagatttaagccatatgattacgcgctttgcgcctcaaagctatctggatcagcaatattttgagaagttcggtgaatattatttgcagttcgtttcgttgggtgaaaacacctactataacaagctgttgaacctgatcaggaacaaatatccgcgtgagaagaacagcgtagaatatctgtggtcggaagtaaaccgccgtaatatctacctggataaaacgaagcgcgatcaggtggtgcgtttctttgaatctcgttgcagtgatttctactcaacgaaaggcattgaggcaagctataaattcctgttcaaactgctgtataacgaagatgtaaccgtagaaatcgaaagttcaaacactctggaatatgatattctggttcactcaaccaatatcaaccaggacatcgtaggccggacgatttacacaccaactgcaagagcaaacgtgacgtatatcgaacgccagtatgatgacggtcaattacgctggtcaatgactctacataacgtgatcgggaacttccttgaagggcaggttgtcaagtctgaaaagactaacttcacgggaactattctgcgcggtgtgcgtggtaagcaaatggcgaacaactcgatcgactatttcaaccgtgggcgttcgtactatgtgatgaaaattcgttcgaatctgccagcgtcacgatataaggatgacgttttacgattcgtgcatccggtaggctttggttttatcgggatcaccatgttaacggtgttcattaactccggtttgtctatgacacatagcgaaacggtcattgatattcttcgaaactatcgcttcgatagcggttatccgaagtattggcctgatcgtgtagcccgtctggacggtaacggaaaccagacatttgacctcgtaacaggcgaagcattatacgaaccacaccctaaagcggggcaaccgttcgatgttccaccagaatatgacgttgaagaacaaccgctgaatggtgtattaccttccgcgcgtcgatttgatcaaagtcctctgttcgatagttctgcggttaaatactctcagttccgtaacttagtggaaaaacgattgaaagacgacgcgggtaatcctcgcgatccgaatccaccgactcagagaaaggtagcataatggctcaacaaaacatctaccgtgcggttgtaactggtaagttccgcacggaaaacatgatgaactttcgcgaaatgatcggggatgaccccgatcataactcgatctatatgtcgatcgggcgtactgaacaatgggcggataacgaatccgatcctgaattcgcgcccccttatcctaacgatgatacagatggtatcgttgatatgtggacgcatatgatcgggatgacgaaagtaccaggcgaaatgattgatgcaatcgttccgcgtaaagactggggcgatactcgatatcctaacccaaaaatcttttacattaatgacatcgtggtagtaaactccgctccttataaccgtactgattacggtaaaggatggatggtgtatcgcgttgtggacgttcctgatattggttcttgctcaatctccagtatcacgggtaaagttgaatgtgtgcgcattggtggcatttggacaccgacccacgaatcggtcgaacctccacgcggagaagcgaacggtatcgacatgggtgacggctatatctgggaatatctctacacgatcccgcctgatgtggttattaaccgatgcacgaacgaacatatcgttgttccgttcccgaatgaactcgaagaagatccggttcgctggggttatgacaacgtgatcaagtggtatccagatatgtatgatttggtgttccgaatgaaggttcactcaatgcgattccgtgcgtacatggattccctgttcttcccgcaagcatctttacctggcaaccgtggattccgtcaggttagtgtaattgtaaacccgttgctgaaaaaggcgcaaccgaccgatccagaagtaaaagcaacggggcagtattacacgaaagaacagcttgaacttgactcagggcaaatgatctacatggaaaaccgtcaaccgattattcgttctcctgatcagaccgaagaagtcagtattattttcgaattctaaggaaaaccataatggcatatcaaactggtaaaaaattaattgacgtggggcagatcggcaacccgtcaactggtgacccgctgcatgacggcggtgttaaacttaacgaaatcatcaccaacatgtacaacgcgtttggtgatgtgcgtttgttgactgcgaatgatggtgtgggtacaatgctgctccacgcgaccggatatttccagaaactaccacgaacctattattcaggcaacccgatcgaactgggttcattgcatgatatggatacctcaacaggcccgattacggtcgtgcttccatcgggtaaacccggcgaagggttctatttcataaatagtaacggtagcatttctgttgatcgtcctgttgtattccgtccgcaagttggcgatggtatcaaaggggttcaggatcagctttacataacctctccatatactcagattaaaatctggtgtgtgaagaaagaaggttctgtttctacatgggattattctgttgaatcaatgtttggttcaaagacaatgcctgttgatactaccaaactcattttgaaagcatcaccaacggctattcctatgtttggatatagcgaatttagcggcgctaaacttctcgtatacgcggaaaacatgacaggcacagtcaataaaacagcagaaattctgcttgccgtcgatcgtgtggctaagggcgtttattcaaccgaatacgcagttcttaaaaatacagaagatgaaatgtatacgcttaattttactgttggcgctggtgatgttgtttacgcaaacgtgcaatcgaaaaccgaagatcgtattaaattctcgatcaaagcggttgacaccatcaaatcagggatcgcagcatgaaacaagaaattattatcggtaacgtggttgacgatggcgcaggtgattatctgcgccgtggtggtcagaagactaacgccaactttaccgaattgtatgataagctgggtgatgggagtatcccgcacccagcgggtgcgtggaaaacgcataccgcgcctacgctatcccctatctttggtgattcgtgggctttgaatacaagcaacaaccgtattacggtaaaccttcctaaaggcagcgtaagcgattataacaaggttattcgtttacgtgacgtatggggtaagtgggcggcaaacaacgtccgtatcgtccctgcaagcggagataccatcaaaggttcaccgaactacaaagaactgtacaaagatttgatggatgtcgaactggtttattgttctcctgggcgttgggaatatgtcgaaaacaaacaggttgacaaaatcacaacttcggatctggctactgtagcgaaagaaacctatatcgcgactcagggacaaactgactttctgaatgtgttcggccctggtaactcgtacaacgtccgcgcactggaagtttactatcgtggtaacttgctatacatcgacgacaagaacgggtttaatgcatcaaacagcgattacggttcacctggtgcgagcgccggacaactgatcgaactggatggtgtaaacatacgtcttaaaaacccgtgtaacgctggtgatacgcttcaattcgttacctatctggatggtattgccgcatggcgagcgacgtatgaagcgcataccatgcgcgtatataacacgggtgacaccgaacaggtaagtatccctggtgaaatttgggttggtgatctgccgaataaactcacattcaccactgctgaatttggtatcagtccgcgaattctggttaacccgaactcgttcgaactgctgctgaacggtcgacagcttgttaaagcaggtgatgcggatctcccgacatttatttgtgagggcgcagaaggttatgacgaagatagctgtattgcaaactccggtttgtgggttccttctggtcaggattacagtctgatttttgttgattccgaggttactggtattaggttttctcaacctctggaaactcgcgatgtggtaactattcgctggttcaacaatgatatcggcactgtaatggaatgggacggtgtaggcggtattaaagaacacaccgataagatttatctgaataacgaagaagaagtaacgctggttaatcagattgaatacaccgattataacaacccgactcagaaaaccgcgcgaaaagtcgcagaaccgtttagtggtcgtcttctggatttgcaagcgttctttgacgttattcacccaatcgggacaatctacgaaaacgcgcacaacgatgctaacccaggcgattatatgggctttggtatctggacacgttatgcggaaggaatgttccttgctggatggactaccgacgaagcagatagtgatttcggtttgaacaacaacgatctggatggttcaggtcaaccaactcacacttctggtggtactggtggcgaacgtggttatgaaattaaaccgattaacgttcctgaaatccattcaaccgataaggtgctgattaaggatgacaacgggatcattattatcggtggttgtcaggttgatccagatgcaacagggccaggttacactaaataccgtgaggatgtattaaaagtaaatcagggtaacattaccccagataaactaaaaacgctcccgccgtatattactgttcaccgctggataagggtagcataaatgacacagtttatttccaaaacaagggagggggcgaaagtcccttcccgcgaagcagattttttgcaatatgaaatgggttcgaaattaccgctgattggcggtaaacgtaccattggcggcgcaaacgtcgatcaacttcgaaaaggggtagaataccccaacgtacaatcagcaattgatgacttatattctctgtctgaacaaatccctattaatggggtagtaacaatggcagaagataattcaccgtctgcggttcagcaggtcgaaagcattacgtttgatggtactgttcagaacccagatccagatcagacgaaagcgactgttcatgtttacgggttcccgtttgtttttgacaacacaacgaacgcatcaaccgtatgcgaaaccgtttataacaaatttactgaatttgtgaacgatgaaaaatatttcgatttggtaactcgaaagggtttaaatggggagatcctagaagttcgttttattgacgcggttccgcatcctgtaacgaacacttacgaaaatgggatcagtatggtaggcacgatcgacgtacaggctaaatctggttatggtacatggtcgaaattaggccaagcagatcttccggttactcctgctgttacggtttactatttcaagcgtattgcataaggacaataaatgaacaacacaattaaccacgtaagcgataaatccgtttacgtgacatttgatcctgctggtacgcaatggcctagcacgtacacgaatgttcagcaagcgcttgcatctatcggatcatgggcgcgtactgatgttggcttgcctaattccgcgcctggtgtgcgtggtattgctgctattgctacacaggaaatgattgatgcaggtacagacacacagacgatcgtaactccggctctgctggaataccgtctgcaaaaccctcatgcatcacaaaccgtatggggttacacccgttacgcaactgatgcagaatcaataaccgtaacgaacgatctggtttcattaacaccgcgttcattgaactatgtgtttaacacccgtcagtcaaaagaaaacgcctggggttctgcaaaactgtcaaccactgcacaggcaacgtctggtactgatgacacgaccgcaatgactccgcttaaagtgaagcaagcaattgctgctatggttccggtacagtcaaacgcaactgaaagcaatttcggtttggtacagttggcaacagttgccgaagtccgcgcaggtactatccgtgacggtttcgcaatttcaccatacacgtttattcgtctgactgcaacagaaaccgatttaggcttactccgtatcgctacacaggaggaagtaaacgcgggtactgataacacaaaagcaattactccgcaaaaacttgctgctgtgaagggttctggctctgcatttggtttggttaaattatcaacatatgtcaacaccggattagcgaataccgcgttgtctgctggcgctaacgtagttccaagcaacagaaacagtgctatcactggcggtgcgctgtatcagggttctattgttgctgacaataaataccagacacaaagcgacgttgaagtaaatattccgatcggttgtatgatgctatctgcatttaactccgactatggaaatatttttatctgtaacggacgcgcaatgaaccgcaacacatatcctgttctgttttcccgcatcgggtatacatacggcggtgctggggatattttcaacctcccagatatgcgcggtgttgctgctcgcggtttcgatgccggacgtggattagatcctggacgtggtttcggtacttaccaggatgatatgtttaaatcccacgaacaccagttacagatgatctatcgtaacggtggtaatcttccgtcatccgaagcaatatacgaattgaaaaattcagaaaagaacgaccagttaattatgcaactgaatccagcatacactaaagctatggcaactggcggaaacgaaacgcgaatgaaaaacgttgcagtcaactatgtaattcgagtacgataaaggggttaatccatgatttcaaaacttaacccgttaccaaagatcccgtttgttgatggtgtccctacggacaccacacaaacccagatcaattggattgttaacggcgaaactctcgatggtgctaaaaccaaaaccactaacgagggttctttaaacagatgcggtgttctggttcaaaagaacgcggtacaattagaagcaaacacaactacccagacatcaaaaatcaacgaagttatcgatcaggttaacctcattaccgaaaacctcgcggcaatctctgatgaaagcgtgatcgacaaactggataaagttgtcgctgatgttgacgtgctgaaagtagatatgtcttctgtacaggcaactacagcaagccacactctgaaaattcaggatatcgaaaaggaaattggtgtatgggatgcaacaaccgatcctaaacatcgcacgattcgaaaagatatcattttcctgaaaggtgaactgggggcgtatccaggcttcaacgaagatggtgatgttgatccgtcctctactggctccggcgtgaaatacaaggtaatggcgaacgctcaggcggtatccatccacgaagcacgtattactaagctggaagatgactgggtaaactcagatgtaggtcaattgactgatgaagttacggatctgcgtaacgaaatggggccgaagcatttagcaacgtttgaatcagtttatgttcgattgaaccatatcggtgacgatatcactggcattaacaccgaactgtcaaacatcaacacgtatatcgggcgcacgggtacaggcggatcaggtagtattgattcacgcatgaaagcggcagaaacgaacatcgttactctgcaaacccagatgaatgatccggttgttggtgttctgcctcgcgtaatccttctggaaagcgctgttggtaactcgcaggttccgggtagtatccgttacgatatcagcacaatgaaacgtagcattagcgatctgaatatgatcgttggtgaaacaagtgatgatggtctgcgcggtgaaatggcacaggtgatgaccgatattggtactgactcccagcctaccagcattaaaggccgtcttttgaacgtagaaaacacccaacgtgacgatcaccaagttcttgttgatcttacctcaatagtgggtaatacttcaagtggtttggttgctgcgaacatcgcaatgggtaaagctgtttatggtgacgcaaccagttctgatccattcctcaaagatggtattcagaaaacggctcgcgacaacaaaacagcaatcggtgtgaaaactgctggttctgaaacaggtatctataagctgatcgctgatctaactactcgcgttgctgctctcgaagctgctggcggtggtggtaatgttgaacaacgtctgaatgatctggaacagaataaagcctctcaccaggatgttgctgacgctctggttccgtatattacagaagttgaagcagatgccaaatacgaagcgaagaaaattccgttgtcatttactcaaaaccttgtcggtcgtaccgattatatcgagggtgataatatttctttatctgttgccgttacgggtggtaaactgccttacgtgtatcagtggaagaaaggaactgaaaatatcgggactgattcgcaaagtgtaatgatccagaatatcacctcaagtgattccgctgtatataaagttgtcgtaactgacgctgaaaataccgtgattacttctgatgaacttgacattactgtatatccggttcctaagtttgatacaaacttgagtgatgtttctgtcgttgagggcgaacctctgactctggaagttgtgtttagcggcggtaaaactccgtacacctacgtatggcataaagacggttctgtattaactggtcaaactggttcttcgatcgtcaagtctgctgcaaccagcgcagatgcgggtgattactatgtaaccgtaactgacgcgatgaacagtaccaacgattcggcaaccgcgactgtaactgtaacggtagcataattttaacaaggggcgaaagccccttttgaggatcatatgattacgaataatccagaacaattgaaagatgaaattcttcgtcgtctgggcgcaccaatcatcaaaattgaagtcacacaagaccagatttatgactgtattcaacgcgctttagacttatacgcggaatatcattacaacggcacaaacaaaacgtatctgattttgacactgggcgatgataacccgcgcaacgtgtttgacttgagcaaagagcacatcttcgcgatcacgaaggtattgcgtacaaacataggttcattgaccacaatggacggtacagcggtttatccgtggtttaccgatttcctgatggggctgactggtggatctctgggtgggcgctgtgcatcgagtgtgtacggtatgaacgcatacggcgcggatatgggctactttacccagatgatgtcctatcaacgctcaatgcaagacctgctggctccactgcctgattactggttcaacgatgatactggtcagttctgcgcatgggggcaggtgaacaaaggtgacattatcgttattgaagcgatggttcgttccttcgttgatgtccctagctccgtaggaagcgtcgcaggatacgctacagcgggttctaacgcagtggaagaccaatccatagccgacatctacgaaaacccgtataacagcgttgtaggcggtgtacgagcgggacagggttcaactgttacgggcggaacgtctgcatacaacaaccgctgggtaaaagactactctaccgcactggtgaaagagatcaacggacaaattctggctaagttccagggaatgcaattgcctggcggtgttgctcctgatggtacgcgactgatccaggaagcggaaaccaaactgcaaagtctgcgcgatgaactaatttcgatgtctgacgcagtaccgatcattatggtgtagggggaataatgcaaaactgggatgaaagtttattcgctcagttgtctacgggggaaggggttgatcgtaacttaaaggatcaggtcactaacccgtatgtaaactggtacaaatacaacccgacacaacagctacatgattcattgacagcagaatcaatccagatgaaatcgcctgatatgtattacgtccggcgcgactttgtgaatattgataagattcttggagaagaccgagaatctaaatttacgaagtcatggaaaattgctgcgtatattgaatcgtatgccaactatgaagggcaacgagatttctttagtaaatttggtttgaactcaaacgatgaaatgacgctggtaataaatcctcgtttgttcgcacatcaaactgatggtggtattcctgttctgggggatttgatttatttccctatggataatagcctttttgaagttacatgggtagaagccgatccgttctatcagttcggtgatcgtcctcaacgtaaaattaacctggcgaaattcatctacactggtgaagaactggctcctgaattgcagcgaaatgaaggaatccatatcgaacctgatgcagaactggatctcgaaccgattcgaaatcttgacgggctggctgatatcaacattgaacagtacgaagaagacaaagaatttgaaagagaaggtgatgaattcatcgaatcttttgatgttgtcaacggacgcggttcaccgtttgcaagtctgccataaatacgttatatgggtataggtgaaagtctataccctcttcgaagaggattttatgatatacacaaaacttaaagaatggttgcctcatgatctatacgttgagtatgttgatatcataaaggaaaaagtacaatgcccccattgtgggataatgtgcgctgctaatatggcaaagcgctggcactttgataactgtaagtctggacaagtccagcagggggattagaaaatttttggatactggtataatagttcgctgcgtaactacattgttcttatgggacaattgtttaaccatgttcaggttaaaagagtacgcggcgatcaagaaaaatacatcaaggttccgatcacctatgcatcgaaagagaagtttctcgcttccatgaacaaacttaactacacgttgagtcaggaaaacgttgctaaaacggaaacgattttaccgcgcatgaacttatcactggtggatctgcaatataacgcaatccgtaaaaccagtatcgcggtcaaccaaaaaatgacacagttagcaaccccacgaaaaacgatcacacagtttaaccctgtgccatatcgtctgattttcgaactgggtgtgtatacgcgatatgaagatgatatgttccaaatcgcagaacagattttgccatattttcaaccgcatttcaactgtaagattaccgaactgcataagaacgatatcacagttgaccgagacatcaaaatcagtctccaatcggttgcgccggataccacattcgagggcgatgcaaatcaacgccgtcatgttgagtggtcatttatgtttgaattacagggttatctgtacccgcctgtaactgatgttaaaggcgaaatcagaaccgtttacacggatttcttcgctaacatgaacccgttagataaagataactttgaatccgtggatagtcaagccgatccggtagatctgcctatgcaggactacacgggcgaagaatatattcagacgtactcgcacgataagccgatcccgtctggtgatgaacctcctaagccgagggaatgaaaatggatgaaaaattagatttacagcaattgctgaatattgattccctccctggcggcgttgagtctggggaggatgtggttgtttacgagaaacttgaactggttgacgttcaatcacatccagcagaccggaaaccggatctggaagaggattatacgctcgcgcgtaagactgcgcaccatatgaatcagatgatcatggatatggcgcagatcgcattacacaacgcgaagaactccgaatcgcctcgccacgtcgaggtattcacaagcctgatgaatcagttaaacgtttcaaacattggcctgatgaagattcacaaagaaatgcgtgagattacggaagagactacaaagcctggtgcggaaaaaggcggtagtaatgaaatgaatatcgagaatgcaaccgtatttgttggttcccctacggaactaatgcagaaatacggcagtgcatatgaacccaaagagggcttcattaatggtgaagctgtagaggtaaaccctgatggaaatggaaccgacgatcgatccgagtaaggaatcagatcaccctatcggattaatgcatcccaaatatctgaaaaagaaaattgatgaattggggatggagtggacacaaagcgaacacgataaaaaatggtatccgacaacgttcagcgactacctgaaaattaacggcattcaaaaggtcgatattcagtctaaggacagttcgaactttgccacgtacaaaaataaaggcaacaagaaaacccgatataatggcaaccctaacctgaaacgcgcgtatatccagactaaatggactcagcaaatgttgatggagtgggtgaaatgccgtgatgatatcgtttattttgctgaaacatattgtgcgatcacccacattgactatggtacaatcaaggttcagttgcgtgactatcagcgcgaaatgctgatcgaaatgcacaaaaaccgtatggttgcctgtaacctgtcgcgtcagttgggtaaaacaaccgttgttgcaatcttcctggctcacttcgtgtgtttcaacgaagataaatatgttggtgtgctggctcacaaagcctcgatgtctgcggaagttctggatcgtaccaaacaagcgatcgaactgctgccagacttcttgcagcctggtatcgttgaatggaacaaaggttctattgaacttgacaacaaatgtaaaattggtgcgtttgcatcttctcccgatgcggtgcgtggtaactccttcgcgatgatctacatcgacgaatgcgcgtttatcccgaactttgttgatgcgtggttagcgattcaaccagtaatctcttctggtcgtaaatcgaaaatccttatcacaacgacacctaacgggcttaaccacttctatgatatctggaacgctgctatagaaggaaaatccggcttcgtgccttacaccgcgatctggacatcggttaaagagcgattgtatacagacggcgacaacggcgtatttgatgacggttattcgtggtctgcgaagatgatcgctggctccagcaaagaggcattcttgcaggaacactgcgcggaattcatgggaaccagtggaaccctgatcgctggctggaaactgtcaaagctctcatggatagatattgatgaaacggaaacgaacttttatcagtataaacgtccaattgaagggcataaatacgttgcagtgcttgatccagccgaagggcgcggacaggattaccatgcaatgcacatcatcgacattacgacgatgccatttgaacaggttgcggtgtatcactcaaacaaaacgtcgcatcttattttgccggacatcctgttacgttatctgaatatgtataacgaggcatggatttacattgagctaaatagcacagggcattcagttgccaaatctctgttttccgaactggaatatgagaatgttatttgtgacagttacaacgatctgggtatgaaacagactaagcgatcaaaagctatgggatgttcaacgctgaaagacctgatcgagaaagataaattgatcataaataacaaaaagacaatactcgaatttcgtactttctcagaaaaaggcgtttcgtgggctgcggaagaaggatatcacgacgacctcgttatgtcgcttgcttgtttcggttggcttacaactcaaatgaaatttgccgaattctgcgagaaagacgatttaagactagccaatgaagtttttgcacgggaacgcgaacagctatacgaagacgcattatgtccggttatcgttacaagcggtgatgaaacgatttcggttggttctcacggtatttcgtttatataaattagaggaaattctataatggctttacaatctccaggtattgaaaccaaagaaacatcggtacaatctaccgttgttcgaaattcaactggtcgcgctgccattgtcggtaaattttcatgggggccagcttatcagatccgtcagatttctaacgaagtcgaactggtaaactattttggttccccagacaacttgaccgctgactatttcatgagtgctgttaacttcttgcagtacggtaatgatctccgtgtggttcgcgttgtcgataaagatgccgctaaaaacgcaagcgcaatttttaaccagatcaaaacaactatcgcatcacagggttctaactacactgtgaacgatactattaaagtaaaatacaacagcgttgttgtagaagaaaaaggtaaagtgtccaaagttgacagtaacggcaagatcctctcggtaatcattccaagcgaaaaaatcgttgcccgtgctaaacagattggtacttacccagatatttctactggctggactaccgaaattgtttctcagtcttccggtgtttctgcgtcgattacgattgacggcatcgaaagcaattctgggatcactctgttgaacctggatattgcaaaagaaacaattcagggaaccgctttccagactcttacccagaaatatcagttgccgtctgttgtggctctgtatcctggtgaactgggttcaactgttcaggtggagattatctccaaagctgcttacgattctggcgctatgatttccggctacccttctggggtttccgttaagaacagcggtcgttctgtaatgacctacgggccacagaccgataaccagtacgcttttgttgtgcgtcgtggtggtattgtacaggaatccttcatcgtgtcaaccgagaagaccgataaagatatctatggtgtcaacatcttcatggatgactttttcgcgaacggtggctctcagtacgtttacggtacttccctgaactggcctaaaggcttctccggtatcctggagttcggcggtggtttgtcctcaaacgatactgtaggcgctgatgaactgatgaatggttgggatatgttcgctgatcgcgaagctctgcatgtgcctctgttgattgctggtgcgtgtgctggcgaaaccgtagagattatgtctaccgttcagaaacatgttatttcaatcggtgatgaacgtcaggattgtaccgtgtttgtgtcgcctccgcgctcacttctggtgaatatcccgctggcaactgcggttgataacatgattgaatggcgtactggctataaactcagtggtggtgctgctgttgataacaatctgaacgtaagttcaagctatggcttcctggatggtaactataaatatcagtatgataaatacaatgacgtgaaccgttgggttccgctggcaggtgatatcgctggcctgtgtgtttacactgatagcgtttctcaaccgtggatgtctccagcaggttacaaccgtggtcagatccgcaactgtatcaaactggctatcgaaccgcgcacagcacatcgtgacgcaatgtatcaggttcagattaacccggtaactggtttcgcgggtggttccggcttcgttctgttcggtgataaaacactgactaacgtaccgagtccatttgaccgtatcaacgttcgtcgcttgttcaacatgatcaagaaagacatcggtgataacgcgaaatacaaactgtttgaaaacaacgacgatttcacccgttcttcgttccgtatggatacaggtcagtacatgactaatattcgtgcgctgggtggttgctacgattaccgtgtaatctgtgacaccacgaacaacacgccggacgtaatcgaccgtaacgagtttgtagcaacggtctacgtgaaaccgcctcgttctatcaactacatcactctgaacttcgtagcaacgtctacaggcgcagatttcgatgaactggtagggccgcaagccgtataaagtcaagggggctgaaaagcccccataaataatccgaggttaaaaatgcttactgacattttacgcgcctttgaatccggtgatttcgcacgtccgaacctgttcgaagtagagatcccgtatctgggcaaaaactttaaattcaagtgtaaagcggcaaccatgccagcggctacagttgaaaaagttccggtaggataccaaaaccgcaaaatcaacgttgctggtgaccgtacctatgatgactggacaatcacgatctataacgatgacgcgcataatacgcgtgacgctctggtagcatggtcaaacatgatgcacggaatgggcgatcagattagtggtgatattccagcgaactacaaaaaaaccgctacggtgaaacagaaaaaccgtaacgatgaaattaccgccgatcacaccatccacgggctgttccctactaacgtaggcgaagttaccctggactgggacagcaacaacgaagtgtcaacctttgaggttacgttcgcgctggactggtgggaataaaggttataaatacaggggtagcaatacccctatcattatttttcggagttactatgaactttttgggctttggcaatgtacttagctttttcaagaatttcgcccgtgaggacgaattagatcttgaacagcaattaaaaaatgatacaggttcggtcgcgcctcctaaaaataatgatggtgcttatgaaatcgaaactgatctgactaatcagaaatacgcaagcgtattccagcagttttattctggacaagatccggcgattcagaacaaagaacaattaattaatacatatcgcggcatcatgtcttacccagaagttgagaacgctgtttctgaaattattgacgatgcgatcgtgaatgaacagggcaaagatatcattactttggatcttgccaaaacagattttagtaaggcgattcaagacaaaatcgtagaagaatttgataacgttctaaatatctatgactttgataacatgggtgcgcgtctgttccgtgattggtatgtggattcccgtatctacttccataaaatcatgcataaagacgaaagcaaaggtatccgtgaactgcgtcaactcgatccgcgttcgatggaactgatccgtgaatctatcactgaaacccttgacggtggcgtgaaagtattccgtggttatcgcgaatttttcgtgtatagcgctcctaaatctggctatacatacaacgggcaaatctatcagcataaccagaaggttaaaatcccgcgctccgctatcgtgtatgcgcattctggtctggaagattgtagtaacaacattatcggatatcttcaccgcgcagtcaagccagcaaaccaattgcgtttactggaagatgcgatggtcatctaccgtatcacccgcgcacctgaacgccgtgtgttctacatcgacgtaggtcagatgggtggcaccaaagcgacacagtacgtaaataacattgcacaggggcttaaaaaccgcgttgtgtacgatgctaaaacgggtactgttaagaaccagcaaaacaacctgtcaatgacagaagattactggttgatgcgtcgtgacggtaaagctatcaccgaagtagacacgcttccaggcggtgctaacttctctgatatggatgatatcaaatggtttaaccgtaagctctatgaagcactgcgtgtgccattaagccgtatgcctcgcgatgatgggggtatgcaaattggtggtggtggcgaaatcacccgtgatgaactgaaattcagtaagtttatccgcacactgcaaattcagttcagccctgtgctttccgatccgttaaaaactaacctgatcgcgaaaaaaatcatcacagaggaagaatgggaagagaacgttagcaaaatctccttcattttccagcaggattcatattacgcggaagtgaaagatattgagatcatggaacgtcgcctaacgttaatgtcacaggttgaaggtgtagtagggaaatatgtctcccataaatacatcatgaaagagattcttcgaatgtctgatgaagacattgacgaacaagcgaagctgatcgaagaagaatccaaagaagaacggttcaaaaatcccgaagaggaagaggaaaacttttgatgaaagaatttatcgaagcaatcaaaagcggtgatctggtggaagcgaagaagcaattctattccatcatggaagaccgtaccgaagcccttcgccaagaaatgcgcgttgaactcgcggaagctgtacgcatcgaaggtgaaaccgacgatgacgacaacgatgacgatgacgacgacaaaggcggcgatgataaaggcgacgacaaagacaaaaagccgtctgataaaaaagacgacgataaagacgaataagaggtgtaaataatgcaactcgaactcgaagaaatcagcgtcgaagatctcgaaccccatttaaccgaagcgaaagcccgtgttgatgttctggggatcgatgacggcactgtgaagatcatcgaaaatttggcggtcaatgaacctcatttagccctggctatgatgtccattgtcgagggtttgagtttagatgaagtcattgttaaacacgtagattcgcgcggtaatgtggaacgtaaaaaagaccgtaaaacccgtgaacgtaatgcgtatcaaacaactggtttaactaaatctcaacgtcgccaaattgcgcgtcgtgcgctaaaaacaaaacgtgcaaacccttctattacaacccgcgcacagcgtaagcgtaaaaaagcgctccgtaaacgcgccgcattagggctataaatatgaatgaatcccaactcaatgaaaacggcgatatgctgctaatcgaggaatggggtttaccttgtgcggatatttccgattcaattttagaatcggtcggtgagtcgaaaaaggacggtaaacttcggattgaaggtattttcctccaagccgaaaaagttaaccgcaataagcgactgtatccgaaaaaagtattagaagaagcagtaaacgattatatcagaactcaggttaatacccgtcaagctctgggtgaaatgaatcacccgccgcgaccgaatgtcgatccgcgtaatgcttgcatcctaattgaaaaattatggtggaaaggtaatgacgtttggggtcgcgctgttgttgtcgaaggtgataacggtgatggggataaactcgcggcgttaattcgcgcaggttgggttccaggtgtttcttctcgcggactgggtaaactttccgattctggaaaaggttacggtatcgtacaagaagggtttaaattggcggtaggcgttgatgttgtttgggggccaagcgctccagatgcttacgttaagccgattaccgaatctcagtcaagcaaaacgcttgttgagaataatagtgctgatgatgacgctttcagaaaactctctgaacgtttgaaaagtctatataaataatatcatatcaaacaggaaacttagaaatgcttaaagaacaactgttggcagaagcccagaacctggataccccagttgagttagacagcattttcgaatcagttgaactttctgatgatgcgaaagcaaacttcaccactgtattcgaacaagctgtaaaagcaggtgctgcgaaactcgctgaaacccacatcgcccagatcgcggaacgctccgatgaactggttgaagcccaggttgccgaaaaagctggcgaaatcgaaaataaactgtacgaagatgcgaataaatacttcgaccacatcgcgcaggaatggctctctgaaaacaaagaagctgtgtcccgtgatatcaaggccgatctgttcgaatctctggtaatgggaatgaaagaactgttcgttgaacacaacgtagttatcccagaagcgcaggttgatgttgttgcagaactcgaagatgaactgaccgagaatcagcaggaagttaaacgcttgttcgaagctaatcaggctcaggctaaagagatcgccaacatgaaacgcgataccatcgtttcagaaaaaacaaaagatctgactgaatcacaaattgaaaaggttcagaacctgatcgaaggtttggaatattccgacaagttcgaatccaaactgaccgcaatcgttgaaatggtagcgactaaagcggaaaaacaggttgaagagagtaccactactcagacaaccactaaagatgactttgttccggtgaatgaaaatacacctccagcagagaaatcgaagatcaataaatatgtacaagcggctaaagccctttcctaatcttataaggtaagaaacaatgtctaagaaaaacgaattgatggaaaaatggaacgatcttctggaatctcaggaaggtttaccggatatcgctaccaaatccaaaaaacaactggttgcagcaattctggaaactcaggaaaaggatgctgatactgatccagtatatcgcgacgaaaaaatcattgaatccttcggcggtttcctggcggaagcagagatcgcgggtgaccacggttacgacgcaaccaacattgcctctggtaaatccagcggtgcaatcaccaacatcggccctgctgtaatcggtatggttcgccgtgcgattcctaacctgatcgcattcgacatttgcggtgttcagcctatgactggccctactggtcaggtgttcgcactccgtgctgtatacggtaaagatcctctggctggcggtactcctgcaaacgttcgtgaagcattccatccgatgttcgctccagacaccatgtattctggtgaaggtgcaaacaccgcgtttgctgctatcgcttccggtactgctatcgcttccggcgctatcgttaagcacgtattccaggaaactggtatcgcgtacttccagaacgtaacctccggcaacgtaaccgtaactggtgctgatgctgctgctctggatgctgctgtaatcgcagaaaacgagaaaggcactctggctgaaatttccgaaggtatggctaccagcgtagcagaactccaggaaaacttcaacggttccagcgctaacccgtggaacgaaatggctttccgtatcgacaaacaggttatcgaagctcgtagccgtcaactgaaagcacagtattccgttgaactggcgcaggatcttcgcgctgtacacggtatggacgctgacgccgaactgtctgcaatcctggcaactgaaatcatgctggaaatcaaccgcgaaatcgttgacctgatcaactacaccgcgcagattggtaagactggtttcactcagaccgttggctctaaagctggtgcgtttgacttccaagatccagtagatattcgcggcgctcgttgggctggtgaaagctataaagctctgctgattcagatcgacaaagaagcgaacgaaatcgcgcgtcaaactggtcgtggtgctggtaacttcatcatcgcttcccgtaacgtggtttccgctctggctcgtatcgacagcggcatcactccggcaggtcagggtctccagaaaactctgaacgtagacaccactaaagcggtattcgctggtgtactgggtggcacttacaaagtgtacatcgaccagtacgctcgccaggattacttcaccgtgggctacaagggtgataacgaaatggatgctggtatctactacgctccatacgttgcgctgactccgctgcgtggttctgatcctaagaacttccagccagtaatgggcttcaaaactcgttacggtatcggtatcaacccgtttgcgaactctcgctctcaggctccggcagatcgtatcacctctggtatgatcagcaaagaaatgtgcggtaaaaacgcatacttccgtaaggtctgggttaaaggtctgtaatcgactttacactaaaaggcaacctacgggttgccttttttgttggtgtaaatagatacaggtaagaagccctctaattcaggaaccaaagaaatgagtgataaacactacacaattcacaagttgatgcgtcagtcttcgcttccgtctggtaaacgagaaaaagttatcaacgaagcaacaggtacgaccgacatcaacgtacagaacacgcgcccagaactggtttctttgactcgcgcggttaacaacctgatctatcatgaactggttgctgtacaagaaacagaactccctgttgcaacactgttcggtgttcgctatcgcaaccctaacggtgatatgactttctccagtgctgcaacctattcaggccgaatctctggacgtacagacatcgacgaaatcgatctgactaaagcctacgttaaaggtgatttgttcaagcatgacggtactgacgttgtttatgaggtgattgcacctattaccctgaacactctggatactgacaaagacaccgcgatcatgaaagctgtgttccaaagcaagattcgtctggttagcgaagccgctgatacttctaagtatgaaaccagtgaagatatcgcgtcaacctccttccagatggatcgctggaatattccggtacgttcgcgtaagtttaaaaccgaaatgacggttgaactgatgcaggatttggaagcaaaccagtttgaagctgatggggtgatcgaagacattctgggaaccgtggcaagtgaagaagtcaacaaagacattattcaaactctgatcaccgtttccaaacgttacaacgtggatggactcgttacggatggtatttttgacggcacaaccgcatacaccgcgaaggatgccccagcattgggtcgtatcctgtatcaattagcgtgtgaaatggggcaggaaatgaatagaacgacttcatttgatgctacctacgtcctcgcaacagcgcgtgttgtaggcattctggctgcgtctggttggatgcacgaaaccgacgaacaacacccactggcaacaggtaagctgaacaacggttattatgtctatacagacaccaacagcccgttcgattatatgctgactggttgcaaatatgatctgggtgatatggatcacgtaggctctctgttcttcgctccgtataccgaagctgacgaagcaggttcaatcaaagtatccgtagatccggcatccctgcaaccaaaagttgctattctgatgcgttacggtctttccgtgaacccgtatactgctgaaagtgattctgatcgcctgatcaaaggtgatgattggtctgctcttgcaggtaaatctaagctgagtcagatcgtaggtattaaattacctaaactgggttaacaagttttgttttgagaagaccattatagtaataaagatctataaggtcaaacgagcgaagcgagttttcacgaacgaagtgagtgatgggtaagtacgatgtactgtttataatatttatattttatatatagagaaaacagtacatttccgtatactttttaaccaacattcactcactacgttcgttcatgtactcgcttcgctcgtagatttgacttcttgatctaactggttataatgttactttgttttgaggtgatacatggctgaactaaaacttgaagatctacaggctgaacttgaagaggatatgcgtattgatccgttgaagttacaaagcgaatcagcagacattccgaagatttggtcaaaatggcttcgataccattcgaatgctaagaaaaaacttattcaactccaggcgaagaaagaagcgattgtaaaagatcggttactgttctacactggtagacacgaaagcgaaatgaccgatgtcatttacactggttcgggtgaaatcaaaattgctatctccggtgatcctaagaccgttgaagttaacaagctgatccaatacttcgaactgattgcagagtttaccggaaaagcgctggatatcgttaagaacaaaggctactccatcaaaaacatgttggagatccgtaaacttgagagtggtgcataaaatggcagaagaatttgattgcaaatgcgttgtgtgcaaacaaccgatgaactcccgtaatacggcgtttgtcaatgaagctggcccgatctgcggtgtcgtatgtttgcaatatctcaacgaaaggaatgatcgcggtatcaatgaagccgacgatctgaacgaagttcaaatgttgctgtaggtgtgaatatgaaagactattcaaaaatcgactttaacgaagtatttcgtttgctgggattgatggaagaatgtgtgaccagggttcatgcacttcgaatttcgtttgaaagcggttgtatcgaagacgaacgcccagatttatagcagtaaatagatgtgtacccctggtggggcttgggcttaccgtgtggcgtacccatttgcgccgtccgatagaatttactttcggtggggtgattggtaagataccttcgagtaaaggccagttaattgtaattcagaatagtacagcactgaaataaaataaatgtacgtgtcggaacaaacggtttccgaaattaaaaagccccttcctttcggttggggctttctttttaaaacttctcttcttctccggtttcaagttcggctttcagttcttctcgccgtcccttgatcgcgtcacgcattgaaatgtcatcggatgctgcaacctcgacttctttcacgcgggtgttgtaatacttttcaagttctttcaaaccttctagtgtccggcacgaagcaaccttattcatgaaatcatcaatcgctgcttcgtttacgaatgtagtaaaacttttcatcttggcctcttaaatttctacctgtttgatcgcgtagtcgaatcgttcttcattgtagatccgcacacgttccatagcatgtttcataccgtagtttgtcgcactgtatttatttttggctgtcttagactttgacagcgtagccaggttatcaacgatatcccatacagtagcgagcgctttcgatccgtgcttacgaagtacacgaccgatagactgtttcaccacaacagcagatttgcaagggtgcgcaaaaatgatgtggtgtaggttcttgattgagatacccgtactcagtaccccgatcgaaccgatgacgattaaacctttcgtcgattccgcgattttcttcatttcgttacgatcgtcaatgtctgtatcaccattgaccaacaccacgttatcgtaaaccttgctcaactgctcgtacagccattttccgtgctctttgtaccggaacatcacaaaggcgttttcgttcttctcacgggctaatttgagcgctaattttagaatccacgcgttgcgccgtgtgtggctggttacgtacttgatttccgtctggtagtccgcacccttcaattttttgacctcttcttctttgtatcgaaggaagatcgtgttaattttcaggttggtgacttgtccatcatccatcaaacgacgcgtatcaactggtttaaagactttgccgaacgcaccgatgtattgcatcatgttcgttttcccttctttcagggaaccggataaacccagtttgaagatacattgatccatcgtgtcgataatctttttgatgctcatgcctgttgagaggtggcattcatcaaccatcaaacacatgaactgttggaaccattcggcaggcattttaaccgctgattgccaggtagaaacgtaaatcagtgcattactgtttttcgctgtaccggaacggatacccagcattgccgatttcgggaacaaacgatagtttgcaatgtcctcgatcatttggtcaacaagtgcggtagtcggaacgatgatcaacaccttcccgctgtaatgttccagacaccaacgagagataagcccctgaatcagagatttacctgctgatgttggcaggttcagaacaccgcgacggttcttgataccgtggaacacggattcgcgttgataccagtacggatcgatctgtttgtcgccgtcataaaccggatgttcgctaacccacttgttaaaatcttcttgcgtgatatcctcggtttcgtggatctttggatcaacccagattgaatacccgcgtgattctgcgaatttggataccagataggctaacccatacgggagtttcccgttgtagtccatcaagtaaatgtaaccgttccatccaccatatttgtatttggcctgatactgatagcctgggggctggaagctgaaatagtcacgcagttcatagacaatgtttggttctgcctgaatctgtacgtggcttgtgtttaaaaatttgacttcaatatccactatgattaccctatgtacaaagtatatacgtatttatgtcataaatattggataaacacttggagataccaatgaacattgattacgaaaaagttgatgggttccgtaccctcgacgcaaaagaacagaaaggcgctttagccgattacgctatgactgtgtttgcggttaagctgaacaaacaaaaatccttcgataacatgctggcggatctggttgctgctttaccggaagatgaagaaaagccggaactgctgatcgattcccctgaaccggaaatcgtcgcatataaaggtgaggtgactatgggtgaacctgtcatcgaagccccgaacgttcccgatgtggttattgatgcttctgcggattttatggagtacgttaaagaggtcgcgccggaagtagccgatcaaatccaattagtacctgatgtcgtagaagctcctgtaagcgcttctgacgagtccaaaggcgaactggtatggttggaagggtttagcccgacaatcttcatgatggggcgctctgcgagttctaacgggtattatacctgtccgtggtggatctatgactggattaaacaaaccccagactggtacaaagatcctgatagctgtccacatgcaagcgcaatcgacacaatcaaatcacttgcgttctatatcgtgcgcgatggcgaagttcgtgttcgcgaaaccagaaatagccgattcgaaacatttaagttttagcactttttgctaaaaaacttgttgacgcataccctcgtttaaagtatatttgtactcgaaggcgggggaatggctctcgcagtgaagaaggaaagcaaaatgaaaaacgaaatgatgaaaaacgcttactacccagttctgtttgtttgggttgatggtaaagtgaagaaagtagtcaattcaaatgctccttactatactgttggtgaagctctgcgtcacgctgccgaagctaattatcctgtccctgctgaacctggttatgctcgttggaacggttcaaaatgggttgctgatacctgggacaactacgaagaagcaaaaatggaatgcgatcctgattatgtttctcgccaaatggaagcgcacatgattgcagaccgtcgcctggataacgaagctcgcggtttctattaaaattcaaagggggctacgcccccttttttgtaggtaaaatatgactgaattaaatcacgaatgcctgaaagacttatcagaaggtaaagagatcggaaacgtcatcttccttgatatcgacggcgttctaaataatatgcggtgcatgaaatttggtgagcatatggacattgaatgtgctcgacacctgcgccggatcgtaaatcatgcgaactgtgatattgtcatttcctctacatggaggatcggcaacacaacccatactctacgggaaatcttctacccgtggggattgtatcgcatcattgggaaaacctgtacgaatctaacaggccgacaagctggacgcggtgatgaaatcaaagcatggatcgacaccttcggatgtaagaattaccttatccttgatgacgataccgatatgctgccggaacagagtgaacatttcatcaataccgatgggtttgtggggctgacagaagaacaatccacttacgcgatccgtaatgtgttcggtgtaacaacccctttctgtcctgaatgcaacggctatgggcgcgtgaaccaatatgataaatgtccgtcttgtgacggtaaaattttacttctctaaatagagaaaaactaagaggttttgaaaatggctacagaaaaatggactacggtacacccgatcccgtggcgtaacaccagctttacctatctgccgtggtggatctttgatatcatcgtggctgcgaatgctgcaagcgaagactggcgtgattatgccgaagaaaaatacgcgaaagaattcgacacactgaaacaagcgtatattgattacaccgatgttgatttcatcgaatcccgtaacggttatctgtataagctgagtgattttactcctgctgaacctgtcgtaacaattacaccgaaaaccgctcctgctgatttcaaagtaggtgatgcggatctggctgcaactgatctgtttaccatcgatccttctggtacagcaatgactctgagtgttgactcttccggtcatggttctatcgttggtggtaaacttcatgcggttagtgaaggtgatgttgtcgtaacagcaacctctggatctgttactgcaactctgacggtaaacgttaaagcacaaccagtaactattaccgtataaactaagaaggtaaacaatgctgctatttgaattcaatgatgtattcgcaaaattcagcgatgcgatcgaagccaaatttggcaaacgtcctcaaaacatgacagatgcagaatatgaagctgctgtatcgtccctggttcgtacagatttctatgaaaaactggcgatcgaggtgttgggttgggatatgatgaaatggggcatgacctatcgcgatcgcgaagtcggttttattctcgtcaacgaagcaaaaagcccgtcctgggtgaatagtcaaaaaatcgcgtacatggataaagtatgcgcacagatgggtattgtacgtttagacttctggacttgtcgggatctgaacgaactgaaagcccacgcttaccgttgccctctgatctcccgcaatgataagcatcgtcaagcatgggatagcgcagggaaatatcgtagtgttttcctgaacgacgatatgaacatcactattcaggatgtgaaccgctcctttgcggattacacaccataaacaaaaaagggaaccgcaatggttccctttcttttatgcaatttttctgatttctttcaatgcttcttctttgctaccaacgaagagaatcgcgttacctccggcttttctgaatggcaacacagcttttgccctgtcatcaatcagtatacctttgtccgcatatgctgctttctctccgctgcttttggtgtagtggaattcaggcagataaccgaacaccttcatcaacgcttttcttttttgttctgctaccgcatcggaattgtatttccctacgctggttaagatcgcaacctgacctaaagttctcaaatgacagaacaggtcgatgccctcttgtaatggttccagattttcgtagaagtcagtttgtgatatagcctgtttcgcttttttcaattcttcttccggcattctcgctgggtcgccgtacatcggaacaaaagaaccttcccagttgaacagtacaccatccatatcgaacaaaaactttttcatatcaattcctctggttgtgtgtgcataatattcatatatgttcctattgtcaaccccatgtgtcagttttcggtgcgtatgctgcaactttcgccactaactctttatcaagttgatcaatggatttctgcggcttgccttttgccttaactttgatgtagttagacttaacgacaaacataccgcctttgtcagatttcttgatttcgctgtcaatgcctactttgttgaagctgatccagatatcaccgtccatgtactgtttcagagagtcgcccatgttcaggatcttcgccatagtaagcgcggctccttcgtgggtatccatgaggatttctttaggaacaacacgatcgcgtttaaggttctgttgcattgcaatgtgaacatcgttcataacccaaacgatatggatgttttctttctgataacccagcgcttcaacatcacgggcgatacttgccagcttgctcatgcttttcagggttacgtcaaagatcaggtttggtttacggtcttccggtgctgctgtgataccagcgtacacacgcgcctggtttttgttggatacgttgaacacgtctgcgatcacatgatgcagtgttgctacgttgtccgggtttttcaggttcattgttttgacatcgtgaccagttttcgctttgatctctgctgccagtttggtactacccatgaccaattttttgagtgcgtcaacgtccagggtgatcccttcgatacctaacagcttttcgagggtgaaccctttaccagaacccgcaccgccagccaggatgactacctgaccaaatttaggataagccttaccgccgaaggtgatcagcgcttcatcaaggctcgtaaagtctttgaatgatttcatcttagaactccaggtgtttatttaaaagtatttattgacacggtttatgagtgcgtttatagtgcaattgttcgacggataagccggaagaactttaaccataaggtaacaattatgaaaaatgaactgcatgaattcatcaacgccgctgttcttggcgaccagtcaaaatataaatcccgtcgcgataccctgattgacgatttctgtaatttcctggggttcaagcgctggcataccccgtctatgcgtccagattgtgatccaaaatgggattacttcaaatggactgatcgcgatcgtggttacgtcgataacgtccgcgtaatgtctttcaaccacttatatgcaaattcaacaattgctgttgcaaaacgccacgattcgacttatccgaacgggtggaatgttgctaaagtcattgaaacacttcttcaactgcgtcgcgaatataaatcagcataccgtgtcaatcccaatcctatctataatgaatggcaaatcgtcgcgaaatacctgctgaacatcacctattctattttctgtcgcttcgggacaaaaaagattggatttggctctcatgatataattgcagaagcacgtcaccgcatgatccatgcaatcctgaaaattcaaaactctggtgggcttgttcttgctgcgttctgtgatgaaattgtttactacggagaacaggtcgaagttgatgatgttcaccacgaaaaattcaaaagatttgtattcgggcaatataacagctattcatatggaaacgatattcgtgtgatgaggcacccgcgcattatgttggatatggaagggtgggaaccaggtcacggaattggtgatgccgaaagccaacgtgaacgccgtgttcgttcagttgctaaaactcgcgaattgatgacaggtagccttactgattacctgttcagaacaaaagaagacgttgaaaaagaatttgttgacttgtcgggcgaataacgataagctgtaatctctgaaaacaaggagataaccatgaataccattcattgccgcaaagagttcgttgagttctatcacggatcatgtactgctgctggaatcgaaagcatgttgttgcctccttgtgattctgatactctgtctgaaaaaggcagaaagaaaaatctggatcgtgttttcttcactgctgatatcgggctggctcgtatctatgctggaagggctgcacgttcaataggtggtgatccggtactttatcgggttgtgtgtccggtagatgtggtatgcatgaacgatgacaaaggcgcaagcgtttatcatgctgcatgggctttctgtgaggaattatgaaagataaggtgttagcgtatctcgttttcttgctgggatatcgcgttgaagtgatgggtggctattcttctttgtatggggatttaaccgcgatctggatggttgcgttgggggttatgtttacctttatggcgatctgtattgcgaatgaggctgatcaaaatgcttgaattttatcctgctggttgcaagtcaaatccgcctgatgcatcgttccaatcgtggatctatttccatcgtgaactaaacgacatcatcgaaagtcagtggaaagaccatcctgaacgaagtgcccccgatttagtcgatagcgtaacagatgtacgcaccctggaaaaagggctgtatgattgtctggttcagggaatggtgtgtaaattgattttgtggtatgctccgatcggttcagatctaactcgcaaaatcgcccgtggctatatcatgacgaaacgtgagtttgaccagatctggaacgaacccgactgtttcgaacgcgaaaaatacgaaaatgaggttagttgtatatgaaactatttcatgttgtatatggtggaatgaaaaacatcgacatcgccgcgttatctgctgggatgctggacgaactcgaagcacagatcgggaaacgattcaaagccagtatcaccgaaacgcaaactttgtttgtcgatcaccctgcggatatggaaaaccttgtcaacactctggatgatctgatgatcccgtgtgctgatggttggaacgaagcatccggtgttcatgtagttgtaacttttgttcttaaaaatgttgacagcagaaatgccgaagtgttagagtttattcgtaaaattgattctactaaaggaaagtaactatgaaaatcgttcagcgtaatatcagcgaagttagccagcaggaaaaagtacagattcatttcaaattcaatgatctgaaactgggctatgcacagatcgcccgtgagcacatgctcgataacggcgacatttacgtgattgttcaggaaattgagcgaattcgtgctttccgcgcagaaaatccaaaagtgaaacatgttctgcgtcgtgtgtacatcaataaacatcgtgaagaacagcgcaagcctaaactcaaagctaaacgcgatccgcgtccagataacaaacgtaaagcaatcaacggcgctatggcgctggcgttccaggaagcgggtttggcgtaaggggtttatatgtcttcaatgatgaatcgctggtcgggcgtgataacttcgactatcaaaaaggatttggtgaaggttgaagcaaaaccaaagccagtagaaccggaaaaagttcaaactatggtatcactcgatcctgctgagttagaacaccgccgccgtgcaaagcaaattgaattcgatctgcgtgtcgctcgttcatacaacagtaaaaacgatgatgcgcgtaaccgcaaccttcaatttgctctgacgttaagcgactgggcgaagctaatgagtgaacccgtatgttcttactccggcagaccgtttagcaacaaaggcggttgctctgactcccgaacaatggaacgaatcaacgcttctctgggatacacggttgaaaacacgatcgcagtaaccagcgccgcgaatagcgagaaatcaaatctcgatgcgtttatgaagggttctgtgatccttccagaagtaaaactgaaactgttacgcaaagctgcgtatcaaattgaaaaacaactgaaaatcaaaggttaaattatgtttgtgaaatattcttctctgactaaccattatgaaggtaaattcatcaatggtgtgatcatgaatggttttactggttgtgtgtgggttgcgcgtgaaaagatccacggggctaattttagcctgattacctcggacggtatcaaagtcattccggcaaaacgtagcggtgaaattctccctgctgaacagttctacggttgtgaaccagtagttgcaaaatacgccgaacctgttcgtaagctgtgggaaattttagcaaatgcctgtgaatataaggaatatgctgatactggttctttggttgttcaggtatacggcgaatttgcggggcgtggtgtccagaaagatgttgactacggcgaaaaagatttctacgtattcgatatccgcgttaatggtgaattcctccctgataacgttgtagccacgtattccgttgctgtaggtctgaaaatggctccactgctggcatacggttcttttgacgagatccgcgcacttcctatcacctttgattcggtggttaacctggcgaactccggtgcgatccctgcaaagaacggcgttgaacctgagttcaaaaacttcatgacgctgaaagatggtgaaggtgagaacatcgcagaaggtttcgtgatgaagcctgttcaacccgctttcatgccgaacggtgaacgtgttgcaatcaaatgcaaaacgacgaagttcacagagaagaagaacaagcaagcgaaccgcttcaatgctccttctgaactgtcagaaacagacaaagtgaagctgaacgaattcacctgctacctgactgaaaaccgcgtgaaaaacgttctgtccaaaattgacagcgcgaatctcaccgctaaagatttcggtcgcgtgatggggctgacggtacaggatgcgctggaagaaatcgaacgtaactacggacctttcctggaacagttcgaaaatccaacgctggcgaagaaaaccttcactaacgaagcgtcaaatctggttcgtgagaactggggcgcaatcctgaacaatgaattttaaatctgttctcgaaaacgcaaaaacggctaccctgatcggtagccgtgaaccccctgaacgtatcgcgagtatagccataaagattggacgtgctttaagtgatcgggggatcttcgcttactctggtggtgctcctggaatggatagccatttcatgtttgactactcaccagaaagacggcgtataatcctccctgagaacggttttaacgggttgtattcgaatggtaaggatatcatcgactatacagaatacgacacgtacaaagccgctgacgaagcgagaaaggtagctggacacttcgacaaccaaaacgaatgggtacagcgccgatatgctcgcaattcaatgcaggtattaaccgaaaacctggacaaacctacagattttgttctattctgggcggtagagaaagatttttgtgttaaaggtggtactgcgatcgctgcaaggcttgccagattgtataaggttccaacgttcaatctttggaatcaaaacgttctgtatgaagtctgcgatactttagggattaacactaaacctcctactctggattttctctggtgataactcccgaacaatcacgtaattacgaacgcctctcagttgaagaggcattaaaaaaggcgaaacataatggtagaaatcaatggaatcggtgtgaacgcacaggcgggaagcgggacacagtgggtcaaacgcgaaacgcaagatgatccccgctgtggacgtagcccgacactggcggaacgtgcgcgtaaacttgttgacgaaatcaacgcgaaaatggtcgaagcatcccgcaaagacatttccgagtatgtcctgaaatatccgactaaacaatcatatacctttgatatgaaacgttttatcggtaaggttatggatcaggaatgtaccgaaaaagcatatgcggatctgggtgaatggctggcggaagaagggtttactttcgatacacagcgcaaccgacaagctgcgttactcaataccttcgcgggttcgcgtcgtattaccaactttagcgatcctaagcgtgacggatatagcgatctgacttattacatcacctggtgaaaataattcgaaaaacttgttgacgggagttatgagtgtggtaatatagctcccgtagacaagacactaacctaaaaggaaaacatcatggaaatcaaattagtacctacttgcgctggctactgcttggcactgaatggtgtagcacacaacggtaaaggcttacgggctaacgttgaagcaatgctgaacgaactgggtgcggtttatgaatatgatgacgttgcaaccagcgttaaaatcataagccttgaaaaagatggtgttaactgtgcgggttggtgggattgctacatcgactatagcgacaaccgggtcttcttactgaccagcaattaaggatcgaacatgtttggaatgaatgagtgttcagaagcggaagcgctcgaagattgggctgactttgatgaccttgatctcgataatgaagatggagaattcttctgtgttgggcgcggggttgaaagaacaaagcgtgaacttcgaagccgtttagcaatggggcgtactgttggatctggaaagaaacaacaagttaaatattccgatggttcgattcgaaatgaaacggttgtcaaagaagtaaacgggcgtgtcattacgtccgagcggcagaaggacatcaaacaattgtacgatgttgcaaaagccgctaaagtaggaaccatgatcacttgtcctacgtgcaaacagttgcacaagaagacgacatatcataaggtgttctgctctaatggtaaaaaatccaggaaagactgtaagagtaaatactggaacacgatccatccagaacgtttggatcgtatcttttaaatcaaaacgtggagtacgtttaaatgaaaacttttaatgaactgaatagcctgatcacctcaactgattcctacaaagtgtcccactggttgcagtatccacaaggcactgatgcggcgatgttctatattgaatctcgcggtggtaagtttgatgaagtagtaaccgctggcgttaacttcgttgcgcgggttcttgccgaaccaattaccatgaaacaagttgagttggcacgggtactttaccgtaagcactttgggaaagagattttcaactacgaagggtggaagaagatcgcagaactgggttatgtccctgttactttccgtgcgatcccagaaggtacggttgttccggttaaaaatgccgttgcgactgtgtacgccgaacgtgaattctcatggttggctgggtggctggagacaatgacgattcgcggtatctggtatccgtcatctgtagcaacgctatcgcgtgagtgtaaaaaggttctggctcattaccttgatatgacttctgacctgactggtgaagcatataacatcacactgggtacacgtctgcatgatttcggggcgcgtggcgcgacctctgctgaatctgcgggtattggtgggctggcacacctctataacttcatcgggactgataccgttgaaggtatgattatggcaatcagtctgtttgcggactatcaaactctgtttgatgaagttgaaaacgtcgaagcaatcggtgtttcaattccggctcgcgaacattcgactacgatttcctacggtaaagagaacgaagacgaagcatacaaaaacagcatcgaaatgttcggtacagggttctacgcttgtgtgtatgattcctgggactataaaggcgctgtagatcgcatcgctgaatataaagagcaaatcattgctgcgggtggtactctggttgttcgtcctgattccggtgatatgattgataacatcatgtacaccctgcgtaaactgggcgaaatcttcggatacaccgtaaacagcaaaggttataaagttctgcataattcagttcgaatcatccagggcgacgagatccacgggcctgaaacaatcaaccgtgtgttaagttggatggaagcgaacaagtgggcgagtgagaacatcgcgttcggtatgggcggcggtttgctgcaagaagttacccgcgacactcaaaagtatgctgaaaaactgtgcgctatccgcgtgaatggtgtgtggaaaggcgtttacaaatgcccgaaaggttccgaatggaaacagagtaagaaaggtttgctgatgaccatcactaacggtgtggaattcaaaacaatcgacactctggaaactgagattcctgacgggtggcgtgatgcgatgattacgtattacgacaacggtgtattaaacacctccgatacagtaggggttatccgtgagcgagcaaggatttaatatccgcgccaacgataacggatcggtagtcttctacaacaatcagccccttgtcgctcgcaaggggcttttttgtaagttggtgggctacgggttcaagttggaacaggtggacaacgcgacactaaaagaggttgttcgaattgcttatctgctgaaagataaaaaagatgaacatcgtgctattgcaatgcttgagaaattaggcgaaaatcattgcttcgtggtgaatcgtgggtataagtacgaaacgatcgccttatttgagaaaggactgagtgaactatgagttatttgggtgttattccgtatacaggtaacaagcaatcgctattacctgaactattcaagctgttccccgaaagaagttcatacatgcgtttcattgattgtttttgtggtggccttagtgtgtcgttaaacgtccctaaaccagttctaagcaacgattacgataagacgctgattgatatgtatgaacgtcttaaaacgcttcctgacctgtctccggtgagagaattgattgcatcgaaggggctggggaaagacaagaaagaagagtatctgaaattccgtgatgaatacaaccagaatagagatcctttatggctctatgtcctgatcctgcattcattcagcaacgttaaccggacaaacgacaaaggcgattttaacgctgctgtaggaaaacgaaccctcaactttatgacagaaaaacgtttcgaacatttcaaaaagaatgtgacaggaattgaatttcgttctggttcatactctgatattgaaatcaacgataacgattttgtttattgcgatcctccgtatctgatcactgatgcggtgtataacaaattctggaacgcagatcacgaacgcgagttatatgctttccttgactccctgcatgaacggggtatttggtttggtttgtccaacgtgactcaccatgccggaaaacaaaatgatatcctgattgaatggatgcagaaataccacgttcataatctggataaaaagtatctgttaggccagcataccgactcttacgaacaggaaaaaacgcaagaagtctacgtgtgtaactaccagaaacgcgacgtaaatacattcccttcaacactaaatgatttaatgtaggttaacatgtttaaaatttatggttatattccttctgtctacaactgcgccccatgcctgaactcaaagcgtttgctggatgcgaaaaaacacccatacgaattcgtatctgttgcggattccgtggaagacggtaagcctgtgctgaacgaagcggtgatcgatgaactcgaagccctggttggtacgcgccggatgaccatgcctcagattttccatgacggtaaacatgtaggcgggtttgaccaacttcgtgagtatgtccgcaccctgtaataaataatgacaccttactgaatggtgttattatgctgacgaaacgaattaccaaaaaagactaccccacgatcaaacaagctctctttgaaaaacaagggggctgttgtgctctgtgcaagcgccctttagagggtgagatcgaaaaacatcacctcgaccatgaccatgctttagacggcgaaaacgccggacgtgtgcgcggcctactgtgtaacctatgtaacggtacagaaggtattgtgaagcacaaattcaaccgatccggtcttgtgtcccgtgatgttgactacatccactggttagaaaacctgcttgcatatctgaaacaagattattccgaaaaccgtattcatgacaaattcataccagataaggtaaaatggttttcaagacttaccaaacctgatatgattgccgaaatggtttctatgggcttcgagtacgccgacaaagacgaacgcaaagccttaaccgcaaaatatagaaagcaattaatgaaggcaacgaaatgaaatatctaaacgctcgattatcaacgcaacagaagaaaaagctgatgatgttgatatcctccactgacaaaaagatcatatctctacatgattggatgcttggaaggggtgactctgatttgtgttatgtcaaaccgaaagaccgaacgatgtttgatgatcgcggtcgcacattgactaatttttctcctatcaccgttattgatatgtgggaactccttgagattgtaggacgggatatacctgttgacggggttgaactgatcaaatatcttaacgagattggacacaatttagatattatccataaggcaacgaaatgaaagtagaaaaacgcgacggcaaaaccgtcgatttcgatcaagaaaaaattcgcaatgctgtgtataaagctggcgggactatgacggatgctgatgccgcaatcatgctggttcagtacaatcagatccgtgattttagttcaatgaagatcgcccgtatccaggaactcgttgaagaatccctgatgaaaacgaacccagcggtcgcccgtgcatacatcgaatatcgccacgatcgcgatattgcccgtgaacagaaaagtaagctgttcaaagatatctccggtatggtgaatctgtccaacaaagagatcaccaacgagaacgcgaacaaagacgcaagggtattcccgacacagcgcgatctgctggctggtatcgtagcgaagcatttcgcccgtaatcatatccttccgaaacacatcgtagaagcgcatgattccggtgacatccattatcatgatctggattacagcccgttcacgccatacacaaactgctgtctggtggatttgaaaggtatgctggctaatggcttcaagatgggtaacgcagacatcgaacccccgaaatcaatcggtgttgcgactgctcttatggcacagatcaccgcacagattgcctctcaccagtacggcgggacaacctttgctaacgttgataaagtgctggctccatatgttcaaatgacatatgataagcactttaaagatgccaaaaagtatcaaatccctcgtgatgttcagtatgcaatagataaaactgaaaaggatgttttcgacgcgtttcagtcatatgaatacgaagtaaacaccctgcatactgcgaacggtcaaaccccgtttgttacaattacgttcggtactggtcaatcccgatgtgaacgcatgatccagaaagcgattctgaaaaaccgtattcgcggcctgggtaaagagggtatcactccggtattcccgaaactggttatgttcatggaaaaaggaatcaaccttgatccagaggatcgcaactatgacatcaaacaacttgccctggaatgtgcttctaaacgcatgtacccagatatcattagttcagataacaaccgtgctattactggttctagcgttcctgtatctcctatgggttgtcgcagtttccttagcgtgtggcatgatgataacggtaatgaaattcttgatggacgtaataacctgggtgtggtgacaatcaacctcccgcgtattgctcttgaagcacaggaagcagacgacgcacacgaggctttttggcgtattcttgatgatcgtctgggtttgtgctttgaagccctgatgactcgaattgatagtctacgtggtgttaaagccagcgttgcgcctatcctgtacacagaaggtgcatttggtgtccgtctgaatcctgatgatgaaattctggaactgttcaaaaatgggcgtagctctatcagtctgggttatatcggactgcatgaaacgctgttgatgtttggttcaggccaacacccatttgatcgtatcggctcccagaaattaggccgattgatcattgaatatctccgcgctgcaaccgaagcatggaagaagaaaacagggtatggatttagtctgtattcaaccccagcggaatctctctgccatcgcttctgtaagctggactttgagaagttcggaagcgtcaaaggtgtcacggataaaggctggtacacaaacagtttccatctggacgttgaccgcaaggtaacaccgttcgagaaaatcgactatgaagccgattatcattacatcgctactgctggtcatatcagttatgttgaattccctgatatgaaaaacaacctgcaagccctggaaaaagtctgggattatgcgatggaaaaactggactacttcggaactaaccttccggtcgataagtgctttgtatgtggctctgatgacgagttcacgcctacagaagaaggtttccactgtaagcactgcggtaatcacgatccggctaaaatgaatgtaactcgtcgtacttgcggatatctgggcgctgctgaacgtccgatgaacaaaggtaaacaaaacgaaatcattcaccgtgtgaaacataactaagaacacctagtattagcgccttcaataaataaagaaaaattgagggcgctaatatgttttacacaatctacaaaataaccaacactatcaatgggcgtgaatatatcggcgctcataaaactgataatctcgatgatcgatacatgggttctggaaagaacatcaaacatgctattgatttctatggcattgaatctttcgtaaaggaaatattgtatgtttttgatacggaagaggaaatgtatctaaaagaagctgaactcgtaacagacgagtatatttcgcttcctcacacatacaacatcaaacccggtggtaaaggcggaacggcctacgaacaaagcgaagaacatcgacgcaaaaacagtaatgcgctaaaaggaagagaaatcactccattacatcgcgatcggatctcccgtgcattgaaaaatcatgtccgtagtgaagaacatcaacggaaactgagtgaagcatcaaagattgctgttggtacacccgaacataaagaaaagatgtctgctcattttacagaactgtataaatctcgtcctgaattgaaacagcaaatatcatcttctgtcaaagcacattatgctaatgaaacagaagaagagaaaaatcaacgtcgattgcgtcatacagggaaggttcggtcggaagaaaccaaacaaaaactatccattgctcataaaggaaaacatacaggagagaaaaatcctatgttcggcaaacctgcatcgaatcgccgtatggtttctggtgatggtgttgtgtatggttccgtcaaagaagctgcggaaacactggggttgtcgcaaggaacaatcgttgctcgatgcaaatcacagaaaaatgtaaattggttctatgtaggtgttgacttgccgaatcaaatcgattagtattttctacatcgaagcaaatcaattcgaaatcaaataaggcaaaattatgttcaagaaactcgtatcgttcgtgactggtaaagttgaaactgcaattgaacaaaacacttccccagaagaagcctggcgcagtgctgcacgtatcctgatcaaagagatcgaccgtctacaacatactcgcgtttctgctgttcaggaaatcgtgaagttgaaaaagaaagtcaaagaacacaaagatctccattctggtaaagaaaaagagatcatgaaactgttggcggcagggcaggaagtgtccaccagtcattatgttctggcgctgcaacaccgtaacatctggcagggcttacagacgaagatcgaagaactggaagaaatgaacaaagagattgatctctctgtcgtcgaactggatcgcaaactggctgatgtcaaaatcaacctggagatcatcgaactgaacaagcaaaccgaaagtctgggtctgactgtaccggaagacgtgatcgccgctgtaggccacacctccgtaagcgtcgataccatcgtgacgaagattgatgtgttgctgggtggcaaaaatgccgcttctgtaacctccgctgacgttagcgcttacatcgactccctgaacgcgaaataagaggaaggggcgcaagccccttttttgctatgtacgattatactattgaatttgatcgcggtgaacattggttaatttctcgtgcgagaaacttctatgttaaacttccaaaaaactttcatactttacctgacgatgatacagatcgtttattgagaattctcatagatgggaatgttccacagcgcgtttttcaggaaatggttgatcatgcgtgttctgaatgggataaaaagtattgcgaagaactgacgcatgatagtatagtaaacagcaaccttaaagacgcttacgaacgaagaagtgtatatgacattttttatgaaaaagagaggaaagaaatgatgttcgaagacggcaacagtgcattcaaaccagcacgtaaaacgtatccagactggcgcaaacagtacgcagaacagctatggcacattgacattcccgaagcgctcatgaaagcgattagccctgcggttgactactattcaggctggaaagatgaatatgagttagaagtcggttcgtttaaggcgcacgtcatcaaagcgaccagaattcttgatttcgttgaagctgttgcgtcatgtgatatcgttgaagatattcgtattccgtcaatcaacgtttcgcggtatagttctcctggtaacattcgcggggatcgttatgcgaacctggcaagcactacggataagctgaactttcacaaaatcaatgaaaaaggatttgatggttgtgttctgatctcaatggtggttgtcacgacgcaaggcgaatacaagctgatcattgattgtgacaaagcggctcgtgcaattcccacaatcaaacaatgctttggtgaagatttcaaagtattgatgaaagcccgtgcgatggaaaagttcatccattcgtgcaaaaagaacgtgctggagaagtatgatccggcgctaacatacaccaaaattgataaagaactggtaggtgatttatgctgattaacaaagcgcagtgcaaagcgattaattttctgctacacgaactgattgaaaacggtatcagatttgaattcgttgatccgattaacggtgatgatcgtcatctgctccgctgggtgtctggtagcaatccgctggattcagtctcccaggttgtagagtctgcgcataacaatataccttgtcgtgttctgttgggtagcgttaacgcctccacatggaatggatctgatgcttattatgtcggattcaaaaaagagttgacggacgacgaatgatgttataatatgcccctgtagacaacaaactataggggctaaatcatgaaaatcaaaaatactgctactgaaaatctttgcaacgaaatcgcggtgacttactggaaagaaggtcacgtaaaagcaatgaaggattttcaacagtggtgtgatacccagaagttagccaactgggaatacgccgtaatcgtggaaaggatcaaagaactgatccttgagaagaaaggcactataaaatgattcaaatgaaattagatacccaagcgctgaacaatctgttcccaggggagaaaggctgatgaactttgaccgcatctataacatggatgtggtcaacggtaaaggaattcgtgtagtgttgtttgtgactggctgcaatcataaatgcgaaggttgctacaacaaatcaacatggaatccccgcaacggtacaccatacaccgaagagactgaaaacgagttgattaaactcctttcaaatccccatgtggacgggttgacgcttacaggcggcgatccgttttaccgcaccaatcatccagtattgttaaaactgcttgagcgcgtccgtgcgacgtttcctgataaagatgtgtgggtttggacgggttacgccctcgaagccttacagagcgatacagaacgttctaagctgttaccattcattgatgttctgatcgatggacgatacgaaaaggatcgaccgactaagaaaccgtttcgcggttcggataatcagcgaatgattgagttcaaaaagaattccatcgaaattaaaaatatcgcttgacctggttggtagttctgttaagatatccacgtagcataaatttaacccaattgagagataatatcatgatcctgaatttcaaaacccgtaaagaagcccgtgactattgctggaagtggtcgatcccgctgaaaacatcaccaaaggaagcggctcacatccgtggacggtgagaacaaaagaaacccgcttcgaaactggtaaagattacaagctggttgatgtcgaaggtttcaccgacaatggcaaaaacattgctaacagtgttcagtcaaaacagatccaccaattgatgaacggtgttgtacacatcgcaagccgcaatggtgatcgctataccttcgatgctccggcaggtgtcgctatgaacacccttcgtgcatgggaagcgaaatacttcacagaagttgctccggctaaagccccagcgccaaaacgcgctaaaaagccaaaaccagtaggcaaaccgtctgttgcacctgcaccagcgaaaccggatctggattctgaactggatggtggtgttaacctcgctccggcagtaaccgaaccgtctgttgctaaacctgctgcaccacagccagcgctcgtagaagcgatgcctggttgttttgttgccgaccgtccgtatgttctggtagatgaagctggtttcctgcgctctcacactgcgaacaaacgcattgtgcaacacatcaaaaacaacaacggtgttctggtgttttcgaatgttgacggcgacggtgacgcgacaatcacgcaagatcgtagcctcccgtttgtgatgcaccgtgagcgtaaattcttccgtgaactgggtactggtaatccggcaaacactccagcagttcaggcggttgatatttccaaacagcaacacgatcaactggtcatcgctgctgcacaggcagtagaagacgcactggcagaacaccagaaagcgatcgaagttgtagcgcagaaagctcgcgcagttcgcgaagccgccgcaaaacttgcactgctggcaaataagtaatataattcgggggtgcttacggcatcccctttttatttgaggtaatcatggaattattcgctggaaaaacttacggtttaaccgtatccccagaagtctttgcagaaaagacctggaaaactggtatcgcaaacatcattcgtgaaaaaggttatgtgacgattgatcgcacctcgattggtgagttcgaagatcgcgcctttatcatggacggtggatacgaatatgaactccctgcatcactatggaaatggttcaaggaagtaacaccggaagatggtgaattcaccccagaagaaccagaagaagttaatctgggtaaaggtgtagaggctgaaaacgttatgcgtatcgctacaccggaagaggtttccgctggtgtcactggttcggatctgtgcctgatggatatccctaaattcacgtatcgccctgtaaaggaaaatcctctgcgtgatctccgtatcgatccatcattcggggctaacctggaaacgttgagcatcgcaccgatgccagtacgtaaatccgatgcaatgcttcgtttcgccttgcaacatgttttcggtggtggtagcatctatcaaatcaacatggaatctgaactgaaaatgcaggaagaccagattgcaaacctgttcgatctgcacactcagttaaccgctgttgagaatatcgaaaaactgttaggcaaagagaaaaagcgtattttgcaggatctcaaaccatacggaaagaagaatgaaagtcgaaatctacggcattcccgaaagtcttcataactgttacgggtgcatacaagcacaaaagctgttgacagaaaaagggatagaatatacattttatcccgttctgaaagaagcgaaaaacgatctgggctttgaatacgatcgcccacgtatcgaagagttagcaaaacgggtaaggcaacgtagtttagcgtttcaatacccgcgtatttttgtcgataacaaacttatcggcggttatctgcaactgaaacaacttattggtgattaaatgagccgtgaaattttactccctgctgcaaatgctgttcatgctgaaacgatggaatacatggagaaattcgttgaacgcgataacaccgcgatcatcactcctactcacatggacgcgctcgaagatcgtcttcataagcagattaaagatcaatttcccgaaaaggttagccgcaacttcattcgtcaggaaatcgttgcaatgatgctgaaacattacggcgttgaaatcttcggtgtcgaaccactgaaaccgaagaaagcacgtcaaatgcctaaacagatcaccgacgaagcaatcaagaaataccagaagaaatacgctaagaataaatgatctttaatacgattgaatgtgttccgtcaagcggtaaaacaaaggcgattctgaaccatatcaatcaaacgggcgaaaaagcaatcatcgcttcgatttccatgatgttatcaaaacagtcttatgactattacatcaaccaggtaaaaggaaaacgggcggtgattgtggacacggatcaccgaaccaaaagaaccaataacgatgcgctgcgtgaagtagtcaatgattacgatgtgattttcatcactcatgcagcactgaaaaacattgatgactttgatttgtataaggatttttccctgtatattgacgaagttcctgatttggttgcgttcgaaagtctgcgatttaatagcaatatcaagcacatacgcgagatttgcttgccgtttagttgcaatgccgatgatatcgttgatttaaaacttgacgaagaaaaacgagaactggttacacgattagcctatgatggtcttcgtaaacgtgatgatatcgcaatgaagatgttcccgctttaccgtgctctgttaggggctattccggtgaagatgcaatgtagcgattcgggatatgtctgttacttcgtagaggatcatgacgtaagccagtggaagttcaaaaatgtaaccattgcttcatccaacatcaaagacacaattacagggaagatcctgcaaacgtttcatgatgtggagttcaaagattcaccgcttcaaaagctggttgactttaagcaatacaaaaacactgggcgcatacatatacatgtgctcgcagagggggattattcgcgttatacgggcgatctctctcaatctgggacgacagtatacacccagattaaaaaacgcgtggaggcgcttctagggggcgaacagttcatctactgcaccaacacgtatcgatcgaagtttagcgaggggcaagaaattccgtataactcgcacggattgaacttctattcgagctatactaacgtggtagcattattcagttacaacccgttaccctggcttcgtcaaatgttgcgagcggttgcggtgtcctctggactcgaagaggaagaattagttgatgcttatgttgtcagtaaatattacgaaccagcctttcagttatgcgctcgttctgatatccgacacaacaacagcaaacgaaagattaatttatttgtgcctgatatgcggttagcgaaatacatgaaggaaaaatattttcctgatgccattatcgaaaccacagaagcagttcaaacgaaaaggcaacgcaaatcatttcaaacccttttccaaatgacggacaaagagaaaaacgcttttacgccatacaagaaaagaaacaaattagattatgcgaatcctcttcatcacgcgattgttaaagattggctgaacaattaccgtgagaaaaaggcgacttgatggtcgccttttttgtttataaatatcagtattgaataagataaaggaaaacgataatggtagctaaatcattccgcgccacaagtggccttgatgctgctggcgaaaaagttatcaacgttggtaaagcatcccgctctgtgttgagcgacggcgtgaacgttgacttttttaacgaatttaacacgatccaacaatacgattctacccgtggctatgctgcgtttatggctatcatgtacgcgcgtcgtatttggtacgctcgcgcagatattccatcaccagcgggtgctttcgatgaaacaaaatggatctcaacccgtaacgatccaaaatgggtatataacaacgtaacgagcactgacggtctccctgttgaatccggtacgtacttactggctgatggtcgtttctctgaactgacatatattctaccagattcccctgttgagggtgatattatcaccattaaagacggtggcggtcttgcaggtctcaacaaccttttggttcgttcaaacacccgacagatccgtttgcgtgatattcagtcaagctcttatcgactgactcacccatacatgaccgtagcgtttatctttaacggtaacttatggcgtgtttctgaaatgcgcgataaccgcgattcgcagtttgtgaacgcaacaggtgcgggttctttccaactgcaagcgggtatggtaacattccgtaatagcggtacaggcaagattactctgcaattgcctagatacgcaaacgatggtgactcaatcacaacttacgatctggatcgccttgcttcggtgaacgttgcgactctgcaagtttatcctggtagcggacacacgatcagctatgacggtatcaacaacgtaacttctgtgacttcacagcgttccggttatggtatcttcatgttcgatcaggctaatagccgctgggtcgtttatgatggtgatcagcgcgttcgtctgcgtcgtatcagtgatgacctgaacatgttgccgaacgattacgtgtttatcaccccgatcgctggtagtcctccaactgtgcgtaacgtaacgctgactcttccgcaagatgttgccgaaggtgatcgcgtgtatatcagtatgtatatgatggggaaaacgcagaactgcacaatcaaagttaaagatgattccggtgaaaagatccgcaccaacaaaaacatgatgcagttcccacagcgtaaggattatccacctgatgactggttcagtgttgacactctgactttcaacgccgatactgactatcttccatatatagaattgtcgtatatgaaagctacgaaagaatgggtagttgcacaatatcgcccgatcattgaacgtgttgatccaacaaaccgttctcgtctgggtgtgatcgcgctggctacacaggcagaagtaaacaaaaactgggaagatttgccttctgatgaactggcagtaaccccgcgtacactggcgaataaaactgctacggaaacacgccgtggtatcgctcgtctggcaacaactgcggaagttaaccagaacactacggctacttttttggatgacgtgatcgtgacgcctaaaaagctgaacgaacgatcagcaaccgaagatcgtcgtggggtgctggaaatcgctacccaggcagaaacaaacgctggtactgatgacactaccgcaatcacgcctaagaagctcgatacgcgccgcgcgaccgaaaccctagcaggtatcgggaaactcgttacaactggcgctacgacagcggagggggctttacgtgggaatgctggtactaacgtctacaacttcaataacggtgttgatctgatcactccgaaatcattgaacgagaagacggcgaccgaaaagtcaaaaggtctggttgttctggcgaccgaaaacgaagtggtaactggtgctgctgcgggatctgcttcaatgccgatcgtagtaactcctgaaatgctgcatcgtaaaacgtctactgaaacgcgtatcggattgattgagatcgcaacccagacagaaacgaacgcgggaaccgatgatctccgtgcggtaacgcctaagaagctgaacgatcgtaaagcgactgaatcacttgatggtattattgccctcgctaccactgcggaagttgcagcaggtacggtaacgaataaggcggttgttccggttaagctgaaagagttcttcgacgttacaagtcatgttgcggttgcaactgatgatggtttaactcagtccggcactatctggacaacgattaacctggggattgcgtctgctactgaaacacagcgcggtactttacgcgtagcgactcagggcgaaactgatgctggtactctggataacgtggcgatcacgcctaaaaaactgcaagcgaagaaagcgacggataccgccgaaggtattattcgttgtgcgactaacgcggaagcgggtgcgggtactgctactaacctggcaattactccggctaccatgcagttcttgaacggtactgatccggcgtggggtgcgacgacaactcgacgcggtgcggtgtttatcactacccaatcaaacactttcatcggtgataatctggttggttctactcaggccgttgacgattatctcgaagatttctatgctgtatcgcctcgcggtctgaactttgctctgcaaaacttcttaccgaaaatggcaacggcacagaatagtttgagtctgggcggtgtggttgctgcaagctggatgcgtcgtgatgcaaaccagacggtaactggaaataacacgttcaacggtacaagcaacttcgttggtaaagtaaccactaacgggactctgacggctaacgctgcggtaactgttaacaacaccgtaaccacgaacaataacattaaccagtctgcgaaagcaaacacggtttatgctaatactgttttgagtacagcaaccgctggaactaaaaacttgcttcgtactttccgtggtggtgtgacggatactacatggcatgaaactgttcagggaactacgtatcgcttggcaactggcacaaccgacacgaccgacgttctgactgttggtgatgtatctaacggtacaatggcgtactccggtactactctgcgcctgaatggtaaagcactggctaacacgaacgcaacaggtgatgtgactattgcaagtgatgcaagtcctacggtacaattacgaaccgatgcaactaacggttggaacggcgtaacaatcagtaatgataacggcgtgactactgcaaccgtaatcaacaccagaaactttacccagcatcttgacagtacctatgtcaatacagcgggtgatactatgactggtgcgctgtcagttagcgtaaacggcacgggtggacgctttaccagtgtgagcggtacggcacatgttcaggcgggtgatttctctggtaacgtccagaagatgcgcttaactggcattgacgataaggtattgactgaattcaatatcaatatcaccgattacaacaaagcgatgatcaacggaaacctgatctatcatgcaggtcgtaaaccaactccggcagaaattggggcggttgcggttgcgggttcaactgtagatactctggttgttcgtgattacatcaaaatcggaaacgtaaaaatcttcgcaaatccaacaactaagacttgtgaatttgtgtgggaggaataatttaaatggcgaataacgaatttatggcgttattcggccctgatagtttcacggcgaatgtgttttcagaagcaaacgccgtgaaatatcgccttgttgtccgtggaacgaataacgattctgcggtcaactcggttgaggtatctattaacggggctgatattataaacagacgaacacaagttgctcgcggaattaacctggctgtcattgatggaacaactttagcattattggattacaaggcattcgatatgtatggtgatcctgctacgaacgggaatgcgattaaagactacctgaattcacttccagcgaacagaattgtgtgtttttatactttcgatgctatcaaaagtgatgacaactttttagcaacaatgaggaaaataggttctgttgcgtggcctgaaactcggttctttaatatcccgatcaccacaaccaattattctcaccgttcatcctattcagctatctattcatctacgatgaaaaagatttgcatggaaaactttgtcggtggtgctggtagcttgaaagataacacaacgagttttgttgaagttgtttttgatgaattcagtgatatcggggtaacgggtattccagaaagaatggttgatgatgtccagacataccagaacagcggggatctgtacggctttcatctttacgggttgtggggtatcggtagcgatgtttaccagggagacatcttcaagtttactggggaactgtattgctcacaagaacttcgcgatgctggcggtgaagtgcatctgtatatgtggactgaaaacagtattggacaatggacaagttcatctattcttagaacaactggactcgcccccgatcagtggcattctctatcaggatatttcactatcccaaatgatgcagtaaacgttcgtatgggttcgcaggtatatcattatccgtcaaccgttaaagtcgggctggcacaatgtcgcaacgtacagatcacgaaagtaccgcgcgaagaaataaaccgtaatggtgctgctgttggtgtgaacggtgttcgaatgcagacactttccgaagtggacgcaagcggaaatgagaacccgattgataaattgctttctctacccgtttcgcctactggtgttgcaagtgataagaaaatcatttcgcataactttgctgaacttgattatattgtttctgatccggttgaatatacttcgacaaacacagcggagtaccagttcaaagaatggactgctacacggcaagcggaggtaacgaaagcatcactaagcagttatggattaaaagcgggtgatacgatccgtatgcaatgccaaatgaaacgcgatgcaaacgcaatcgccaacaataaaggcgcatatatcgtaatgcagttctgggacgcgaataatacgtatatcacagggatcaacatgcttgatgttggcacgatcccgaacgtatattcattctacaaaaacgaaggggttattcctgctggtgctgttacgtttgatttcggtttatatcgttatccaagcaacacaaacatcggcactgtatccgctaaagatgttaaactgtcaatcgtgagataaaggggcgaaagcccctttttcataaatacagtcattacaggagaaatttttatggctgatttgaaattaggcacaacgctgggtggtgcgggtatctggagtgcgtcaaacctccctctgttgccctctggcgacagattgacgtataaagggtggagagtatacaccgaaaacgataaaccaacaaaggcagaaatcgggttgggtaacgtaacaaacgatgcacaggtgaagaaagctggcgacgaaatgacgggtgatctgacattaaagaacaacacccagttaacggttcctcgtcgtattaacctggttgctgatactgcggggaatgcggggactgctccttatctgttaactactcgttcagataacaacgcggttacagatccgttcccgtcacagcatacgcgcacgtttactttgtttgtcaacacaaaatcgaatacttccgatcctgctggcggtgctaaccttgctgctctattatcgcatcaatcaactactggggcgggttctatcgaactgcaagcatatgatgcaccaaacaagacaacaggcgctacgggcattctacgcgctcagattgggcttaatggctgggatggttctattaacttgtcgggtacttcgttaaacgttggtatgagtacaacggtcagtggtaacttaacaggaacccaactgatcacaaaaggcgacggaaaccgaaacctgtttttccaggattctacgggtaacgaacttggtttgatttatgcagatacagggaagaacgtgtatgttcgatctggtggtggttcgtatgcaagtcgttttgcttctgatggaactttaattctcgcaaaccatctaaccgttcctggtctttcaacatttacaggtctggcgacgtttaatggcagaatgcatgttggggctgattacgctacacaaggggcatacacatcaattcttcgtgttgatacaagcggtgatggaaacgcggttggtgatggtgttactcactttggttataaagatagcaatggactatataatcattatattcgtggcactggtgctttgtttatcaacactaaaggtgggttggcggtaaacgtccaatcgttttataacgatgttccggcaggaacaccatcacaggttttcttgtctaacgctgctaatggtacgaaaaactatatccgtcagttccgtggtggcactggtgacgtaatctggcatgaaactgttcagggaaacacataccgtattgcgacgggtagcactgatgagcaagaagaactgtcaatttcatctactggatatcttcgcgcccgtgcggaggttcaaagtacatttactggtggcggtggtcaattccgcgcggttgctggaaactatgggttctttattcgaaatgatggtgcgaacacgtatttcctattgactaattcgggagatccgtatggtggttggaatgggcatcgacctttccaggtcgacaacagtaacggacaggtaacggtcggctctcaaggtcttgttgttcctggttccgcaaggtttaacagtggtcttggttgtggtactctgaacggtttaggcacaaacgctatttgtttgggtgatgacgataccggattccgacaggaaggtgatggttatcttgatgcttattctaacaaccagcgtatcatgcgttggacagcaaataatggtggttctgcgcaatcatataagcgtttctatgttcaaaataccgatggtcccgcgttggtattgaatgggccagcaataaactcgtcatgttacctacttattcaaagagcaggtaataacggtatgtatatcggatttggtagcaacgatgaagttgcaacattccataactatcgtttaggcacatcactgatgcttgccgatgctaacgtgtatactaaccgtggtgtatatgcagaagggaacggtaactttaacgatgtttatattcgttcggatattcgactgaaatctaatcttgttgaattgaaagattcattaagaaaagtcgaacagcttaaaggttatatctacgataaacaatctaaggatgcagacgatatcgtatatcatcgtgaatccggtcttgttgctcaggatgtcgaaaaggtattaccggaagcagtacgcgaagaccgcgatactggtatgttgacgatctccccgtctgcaattaacgcgcttctggtgaacgcaatcaatgaaatccgcgaacgtctggaagtaatcgaaaacaaattaggggcttaattgcccctctttcatgaggtatttttatggctattgtaggagttcctgggtggatcggatcgtctgcggtcggtgaaacaggacaacggtggatgtctgctgctggtaatgccgttcgaatcggtttacccttctggatgtccagaatggcgggtcagtccgtttataacatcaactttacagtgtatgagcgttactataacaacgcccgttatcgtggtcagtggggggttggttggtactcgccatattcaaaaccttctggctatcctgctgtcgggggtagtttcaacggtaacgcattcggtactgtagtttctgcgcaatcaggcccggatattagcgtaattaccattcaaaacggccctgctgttaacttacggcttactatggatgacggaggcgtatttgatttcaataataacggtcgtattcatgacggatatcgtcaatatcagatctcttctggtcaaacaaccgcatggtatgactatctaaacgcccgtgtaggccaaaaccgttctggtttggttactcaacgttaagtaaattcctaaatatgttcgggggtcggcatccccgaacttgaggattaaacatgtcgctattacaagataaattggcggtgcttgaacgggtaatatcgttcatcatggcggtcaaaacatggaaacagttattcattaaattggttcttatcgtcactattttcattatgtttgtaacatggtacaagtgggatgacttattttcagtctggaaaacatcttcaagcgttatagacgtgccgacgatggatattgaaaaggcaaaaaagtttgaatccgcatccatcgaacagttaaacatagtgcatttaactacgggtgcggatttttcggcaatctttgggttcagacctaagaatgtcaattattttgttgatataattgcgtatgaagggaagttaccgcaacagattaacccgaaaaatctgggtggctatcctatagacaagacatcggaagagtataatagacatataaacgggctatactatatctcagatattgcaagcccgtatcttccaacaaaagaccttgttccggtagcatatacctttagttgtccttatttcaatctcgaaaactattattctggatcgattctaatggaatggtatatacagaagcccgaagtcgtcgatacgaagttaatgatcgtgtgcaatcaggccgcaagaattttaggcaggattcgatgataatttcagtttcaaactactcaaagcccgattgatgaaatcttttactttcgtcatcgggcttttatcgtatatgtcccatacgcgcataagttcgtaaggtgtcggaacatattcatcgttccagtatccaacgttccctatcgtaattcgccggaaaccagcctctacgctgtgatatacaaagaacccagccttacccacaggggcgactttaaaaccgcgtgtagcggctttcatggcttcgtcgtgtgtcatgatagaatcacttcgcctctgaattgattgtggtaaatgtacggacgaacccccagcgggtgatcttcaataacgaaaaccaggtcaagcccgtcatgatgatcttcttctgcaacaatatcccaatcagtcgctttctgttcttcaatactggcaatgaatacctggttgatttcaaccttacggtgagaacggcgaatgatcgtatcaccttcacgaaacacgatcatatctgggttaattggacggtacgcggttttacccgcgcacacttcattaagcatttcttcgtaagtcattctaatacctttactcgctgaacgatggtttgtttaacttctttgtattcgttgtgaagtttaggtgtcgctttgaagcgaatcacatcaccctcttcaacaattttgtttccgtagtagataaccacgttaccatctacgttgattttggtcatgaaacgttccacttcggtgtaataagaaacttgggtatatccgagagaaatcactttctcaacaacaccgctcatttccatacgcttaccgatttccccgatgtgctgcgctgctgcgatcttcgcctggcgctctgcttcccattctgcgcggatctcttcacgtttagcgatgtaatccttctccagcgctacacccatgcagtaagagcaaatagcctgaaatactgggctatcgttgccgttttctttgcactggtcagcccaccacagaatcgtatacatcggcatatcagcaatcacttcacctttacgtttaccgattggcatgatgccctgttccagcagttccagattttcggtatcctgtacggacagtttaccgcgacgttcaaacagatcgaaatctgcgaagccctggaacaccatctggaaagtatcggtttggttcagacgatccaccatgcgatcgaagtattcacgcgctttcgcttccgctttatctgggtcagtagacaggttgcagatatagttatcagaagtgaattcacctccacgacgctctacacgcagggtgtacatagcatttttagcgccagaagaaatgaagtatgtcgcggtaactttagtcaggttagtcatggtgaatctccttagtggtttcgtttcgacaaagccaatataacaaaagccctcaaccgaagtcaagggctttttatcatgcgttcgaatctttcataactttatgaagatggatatcaaaaattttccagtatgcttttccgcgaggataaatttttgctttatcaatgtcttcgttgcttccccatgtattgtttgggttacgacaacgattttttgcataatccatgtgccagaataagcgttgcaccgatgaatctgtgcctaatggatcttctttgctgaacagaatttgtgaactcataagaagaaacctgttcgaactactaaatcgatctgtttttccggtatcagtggcgctttatcgtcaacgttgcactgataatacattccgacatactcatgaggaacgttggattcgctcgcccatttcaggttgtcatctgtacgcggccctaacatgaggttaacgatattgacagcgtgatcctgttctggggtattgttgcatccgttcacataatgtccgtgagcggttttgaggatttcaatgatatcttcgtcggcttcaacgagatacagcccagtgttttctgggatttcctcaagaataatcaaagcggttttcatcacacttacctttatgtttctgcttacgttttgcttctttaagtgctcgcttgcgatcgcggtgagtagaagcgcggttgaaatcatgtttcgctaccaggttgttcatcgaggatataatggcacatgatgttgaatactgacttcgccatacagttttacgatagttaagctatcagatcctttaacaattctgtatttttctggaacaacgcggtcgatttcttttttgacaaagttaagcaatccgaagtcatctatatcttttggtgctttggaaatagaagacaacgatactcgttgacgtgaatcatagtacgaagaaattacaaacatatattattttccttattggggcttttcagccccattttagataattaatccagcagtttgcggattttatccgcgatacgtccggcgcgtgttgcgcttgcggtatgatcgctttctttggtagccagttcagccagcttacgctgatgttcttcttccgctgctttgcggtctgctgctacctgtgcgacctgttcgttatcgtgagcaatacgcgcttcgagttcggtcagggttttgtcaaaagttgctacgatttcgtctacagaacggattttggaaaacagtttcatattcattatctcaattagtatggttggaattcaaagtcaaacagatcatttagtgcgcggttgtattcagtatagttctcaccatccccgaaccgcatctgaatcgcgctttccgctattgtaccagtaagatttgagaaaccaaagaggtttttaatcttatcgtgtgcaacgaagtacagagaagcactatccagcaaggccaccatcgctgatggttcgtgttcgcggcgtttgatacgtaacagagtacggtttgcgccagtcttacggcgttgatttggggctacgtagaatcggaatactaccttacccgttttatcatcaactaccaggtagaagccgtgttctttcaggtcaaccccttcgaacttggtgaagtcaccgcgcttcatgtcacctatcttaacagcgtatttgtggatgtcaagtcttgtcagaattcttttcatttttctttaccagtttatttccgaatttggtgtttacaccagttttcatattcatagtcagtgccagtaagaagatagggcatgacaaaatcaagatcgttgatccgaacagcaaacgaactaagcgaatcaataacgtcccgaaccatttcatcggtatctctacccacttctgaaccgttgcgagcaccagcataacataacccagattaaatgcaagggctgttgcgataataccgtaaggttttttgaagtatgtctgttcgccgtcttctgtgcgtccagcggtaacgttgcctccgttccagagttctttagcggttttaatggctgtttctgccccgctcaagttctgccagtagtcaggaatgctatgtaggaatttcataatcgaatcctccgcgcctgaatcgctccaggcgctgttttgggg

SEQ ID NO: 64 - DNA, 177432 bp, unidentified
  source 1..177432: mol_type = genomic DNA
ttagtaatggctaaaaccatatgtaacatcaatcatgactttataacggcatacacgcatctttgcgttattgtaatccactgggatcgctaccacgtcagcaggatccacctttacctgaatgactctaccaacaccgcccccgtagtgtggaaggtatgatttagccgcaacgtgtaggccagtagaacaggtgcgcgttttatcttcgtctaccatgtttcgaggcatggagacagtcacaccaggactattatcaaatttgccagtagcgagatctttatagttatcgcgtacacgtttccaggcaagaaaacaaccatcatcggtcagttcaatgtcattatgtacaaggaacccgtaaagctggtataccgcatcgcgtgaagggtttcgcatcaaccgttcaaagaagtttaccaggtgttcatacggacgatcgttatacatttcgcgaatgattcgttgagtgatatcagaatcaaacactacatctttatatagaagctgatgaccaatgattttaatgttgcctttgctataggttcggatcgcttcttgagtatccaaacaagttacagcacctttgacatcaccagctttcagcatttcatgcgctttcttaaagttcggatgtgtttcacccgccatgaaaacgcgcccttcgtatacaaccgtaatgaacgattcagatccgatcatacgcggtacagtgtctgatactttaggcttttgttttacatcccttttcttagggaattccgctaacttgcggttgataacgcgcccaatggttcgggcgcttacgttgaactgttgggccagtgctgttttacttgcccccgtcaaccatccattatagatagctttctgttgtacttcgtcaagaattttgaccattatttccaccgtattaatttcttaaactcactgagattcttttcgttgttgtaaatcggacgaattgaataagaatcgctatgttcaacaagtgaagccagtaacgggtttagtgatttaaagatttcccatgcctgatcaacacgttttttcatattgctgcgtttaacgcgcattgatgctacagattcacgcagaatcggacaacgcgccctggaaagatttttaccatctttctcatacccttccagacacactataagttcgagggtatcaacaatcttatacagtttttcattatatcggtttttcacaatccgatcaagcgatacaccaaaacggctatgcaatgcgtttgtttctgttgagtgttccttgccaatccatccaggcaagcaattatctttcaatgccttttcggatttaacatactgcttgcacagcatatcatcaaagcataccagatttgaatccgggatccacttccagaggctgttacggatagcaaacacaacagggatcccagtatggcgcatgatacgcgataaagtagattctttcattgctgaatccatagacaacctggaattttcaccatctaagcggctatattcatcaataccatacaaccgaacacctggggctttatccagtgataaaaactctgattttgtcataaacagagaagtttttgccagattgccgttactatccaactcataacgatatacggtcggggtttttgggcgcggttctgaatttttcggtgcatatagcgcttttgatttttcgcgatctgcatcatagatctctttttcttttgtcatttcactggtacggagatacacaatttccgattcatcaaaatgacctttccgaacgatatcattaacaatctcacgctttgaatcactatcgtaatatgcaacaaagctaacacggcttaggttatgcattttagcatacccgacgatatacggtttaaccgtgttggtatccacttttaacagaatgagtttcttctgtttccacggataataaatgcgtgtgatgtcctggcgtttggttgtttctggcttatacttgctccagcggcctccgctacccgttacctgataccatgcatctttaccgtcgtattcgttcgcccaatacccagcaatataatcatcattatatttgttgggtttgactagttcgctatggatccagccaatagaatcaccgttgatgcgaaaattagcatctttaccaacaaagttttgtaccattgaaggcagagaatggaaccacgtcagtttatcacgaacggtttgtaacttatcgaattctgatttaactcgattgaaatacacccggctgatttgtttcagacgttctttaacaatccctactgtcattttatccatactcaactcttcgcgagaaggcatgaaatcaagttcacctattgggaagtcaataatatacgtatactggctttctgtatagcaatagaacatcgaggtatcatacaaatctttatccagaggataaatgatgttacccatgcgagcatatacaccgctagtgtatgctgatttatgacggatcaccccgctatcgttggttgcttctttcggctgatagttgattttgagaatagaagcaccaacaaagttaggacgaatatcagtaaatgattcgtatacccttgctgcttcgttttcccattctttgatatcttcaactttaaccggaacagtgatagtaaccccgttaggttcatcactttcaatctcatacagaggatcgcagaacggttccccatcatccatatagattgtgtaaccgcatttgataccgtcttttacagattcaactgtgaacgcatcggcatagcaaagcggagatttgcaacccagacccatagaaccgatcaggtcgtttgaatcatttttagttgattcgaagtaaacggtaaacgcatcactaacgaaatcaggagacataccgatcccgtagtcacgaataacaaaacgaggatcaacagcagttggcaactggacatcaaacgggttctgatttcccgcttctttgtgtccatcgatcgcattacaagacagttcgcgaatgattgcgcggatcttgtatttgtatactgtcgaagaaaggatcttatacgctttcttgtttgcgcgtagagatagtttgtttcgtcccttgctggtatctgtaccaactcggtagattgtttgcggtgtatcttcgcgtaatttcattgtttatttctcacttaacattaaaaataacttggtcacaagagtacttcgttggctttttgttcaggccatattctactacttcgcaatatgtgtcaaggaattttactaatttttcttcctcgacctgctgtttcttcatatcaagtataccccacacgatagccccgataatgatagaaaagaacgcacaaaatccgaatatggtcagatattttcccaacttaggcgcattacaacgtgtcataccttacccctctttgcgaatgtatgcaagttcttcatgggttactggacggatatacagacggccttttgtatatgccttgcgcccactgatccaaatgtttttcatatccttaacaccgttcatcacatcgttgtaaaacttcttatcagctttagcctgatagacttcacggccttgataatctttcatgaacaaacagtaaaggatctcattcttatcaaccagattagcatcctttgtagttgttttactcggtgaaggtttagcacccaggcgcaaggccatagcttgccacactttaccatgtccataaccgcgcccgacaagagcatgagcgatttcgtgtaaaagagtgtctaaaatatcctcgtagatatcttccgcaacatgacgaccagatagttcgatcagttttttggtataactgcaacggcccagagtttttgtaatgcgtccattgatccggaatgtccaaccattactgatcaaaccgtgtttttccatcatggtacgcgcccagtgggttacttccattgcactacgagttttcaacattttagaatctcctttgcttggtacaaaaccaatatagcaaaaagccccctgcattgcaagaggctttgttattatttcaacttcttagaaagttcttttaaatcattgagatactcaattttaggggttgtttcttcccagtatttcaactgtttccgcaattcttcggcttcgtcttccagctttttgctttcgtccgtggttagatggtagatgttcatagccactaacatttcggcatgattctcgcaacctatccacgtagacacgaatttaaccgcttcgctgcgactaaggccacgcagagaatcaggagattctaccatttgagcaataaacgcaacctttgccagtgctttatctaacgcttccttagtttcctggatacgcttattgatacgctgttgatatacattcatacgaatatcaacgaaatcctttagaagcgtttcagggcgttcgtatgagtatagtttgccctcaaagataacgttaatgtttgggtttgagttttcaatcaagccgaaatctttcaggatcttttcacgggttagcccattagcatactctcgcttgagcgttacttcataacgaaaatcttctttcgatagatccttgtagctaacgataacgcctttttcttccagcttgtcaaggattgcaatgtatttcacacggtcatacttcactgggatctcggtgatcaccaatttggttttaccttgcaattcatacgtgccgtaaattgtcccgtctgtgatttcacctttaaagtaagggtatttcagatccagtgtgaaatctttatcattcagatatgcaatgcacccgttaacaaccgatttaggatcatgaggcggaatgtttgttgcatatgcttttgcaatcccgctaaacccgttaaccagtaccatcgggatgatcgggagatagtaagctggcggcacatgttccggatcttcatgaactggcgttaaatcaccatccatataaattgctttgaatattggcgatagtttgcacttgatgtaacgaggtgcgccaggtttcttaaccaaacgggaaccaaagaacccatcacggtcgaataacggaatgttattgcaccagtgcgccgccataagggataacgcttcttctacagaggtttccccgtggtgatacccatacatagcaacaccgccagcgatagaagctactttctgaaatcccgttccgccctgcatagcagagtgaataaagaaacggtgaacgggtttaaacccgtctaccaggtgcgggatcgcacgtgaataaatcgtgtaaagggcaaacgttagcccttccacctgtacaacatctttaatacttctttccattagtcaaccttagaaaatttgtgttttccattaacccaatctttacgcggatcagattcgtcgccgaagcatagttctaacacttctttgtattcgtcgtcaagtacgatgacatcatacttcaactgatcacccagaacacgatcgtaatcttctttgcgtaaagaacccagccccttgatatatcgtacatcttttgctttatcgcggaacggtgcaaactcatcaagagaatagaaccatttttcctcgctcccaactttagcgataacgatcggggttcgaatatatcggatccgtttctctgtgaacaaagaaggccaacggctaaagaatgcaagcaacagggttaagatatcaccgccgtcaacgtcagcatcgaccatgataccgatattatcataagtcattccggaagtatcgccaggatgaatattgaggatagccattagttcaaacagttctttgtttttgataatgtctgtaaaactcataccccatgtattcagaggcttaccacgtagcgggaaagcgccttgtgtttcttcattacggcattcgatgaactgaccaacagcggaatcgccttctgtcagaaacaatgttgtttctaccccaggggtatcaataccggaagccggaacgtgtttagcaatttttgcctttttcgctttctttttcgctttggtgatcgcggcggcttctgctgcttgtttacgaatcaatgcggattcaatgatcggagtaatgatttctggggtatccataatcatttttgcgatctttttgtagttcaaattcgcatgattgttaaactcacctgctgtatttgctaatcgctcttttgtttggctatcgaatgcaggtgcattaaagttatgcaggaataccacaagagttaagcattcttttacacgtgctttcgggatctcgatactatgctttttcttgatcatcggttcaagttcagaatagataccatcaatcatacactcaacatgaacaccgccgtttttcgtatccagaccgttaacaaaggatttctgtttaaacccgtcctcagtgctcgccagaatgaagctgaggcgattatttgtctggacaatggttttatccccatacatggaagcgtacagcgggaagcgattagagagcgtttcgccgttatatgtgaatttcacagacgggaaagcaacggcaagggccattaagcgatccttaatcacttctttggtttcttcatcgataccagttacaccaaacatagagaagtctggagtaaacttaacagtagtaccctgttctttactggggctggttcggtaatcgatgttctgtgcgccgtccgtacagttaatggttactttgcgtttcccgtttgcagtctcgccaataaaaatcgagctataacagtttgtcaggaaagaaccaacaccattcatacccatcgttacgcggtttttatcatcgaagttagaacccgattttgccatagtccatgccgcaactggtttaggaactattttcccatctggggtttttacatcatcctggggaataccgcgcccgttatcagagattttaaccagattatgatcaatggttacatcaatcttattagcatgtttgaattcagttcggatcgcttcatcaatcgagttatcaaggatttcgttgatgattttaaccaacccttccacgtactcaaccttgcgatattggcccattatgaaacgttcatgcgcttctttgttaaccgatccgacgtacatatttggacgcaaccgaatatgatcgcgatcgctcatacaaaatgattcgtcaacctttgcgccttttttggctggttgtggtttctgttctggttcatcatctgccagaagaaaatctaaactcatattcacctctttgtttaatcactgacattatatagggttctatgaaaaagaaaacccctttcggggtttacttgttataagggaaaccatcacgaaccatttgaggtttatcaaccgttcgttttgcttcgcctccgcaatcgcaatctttcggtgcatcacgggtagcaatgcttgccatttttggaaattctttattacacttggtgcatttataggtataggtaggcattaataaatctcttttaaacttaacatcttaactaaacgggctttgtctatgtcaaaaacacattgacgtgcgcccggatacaacttttcaacttcgtataccatgcagacgaaaccaacattgtgcatgtactcgcgttcatatgcattgaaccaacgagaaaggcgctgtattgactgaaaaccaaagtataacccagccgcttgaaagtctatgttatctttttcaaggttgcgcatcaatcgattatcgtcatccggcgctggatgtcggttatcatccatatcaatatagatatcaggattcatacagaattgatccaaccattcagcagtatccattgacacataacgattgacatatgggccgctttttgtttgccatttttctgtacaatcattccagaaagaacaagaaaattccacacgatatacgaacatgatataatcctcacaagtaaactcaaggtttacaagtacgataccacttatctaatttttctgcaagcatttcattgataatttttgcaatttcgtaccgtccgtgagtagtacccagttccaggtaaatcacatcaagtgcgcacacaatcgcatcaatactttcttcaacgatattaccgccgcgttgaggctgaatgagacattcgctgatctcgccaacttccgctgataggtgatgaaccacatcactcttcgtgcgtttcttcactttatgagctatttcaaaaaacttatcaagtacgatcgccgtttcttctcgcgttgcagtattctcggatgtcgtctccgtttgttgaacaacgtattttgtaaaatagttttcaaacacgttgaaagggatcacatgaggaacaccattcaaaaacaccccttctttacaaacataatggatttggcgcggaatagacaaaccgccgctgcgttccaaatgtcgtttaacgcttgctacaaaatcgaactctttcccgtatccagccgacatactgtgatacgtgagtaggccaaatgcagaaacatagagatcattttctttatacagattcatttacaatacctttatggtagccaaaaatataacaatcaattgaaggacgttcaccagggaagtgaatgcattgcatgatgcgttcagccattagatcttctcccatgtataccgaagtagtttcttcgttgtaatgggtatcatacgacgttttaagcgtcatgcccggaagccctgcaatgtgcatgaatttagaattggtgcaaggttttcctacttcaccgttaaccatcaacactgcattagttttacgtgcttttctcatttgaatttcaccccgatttgagatacgttccattcttttacgtcatcaacaatatcataatggttgatgtatggtaaagcaatttttaaattactcgcgtcttgaatgttgcgtaagaaacgagtaggagaaagaagacacaacctctcggatccgttgtttcctttagcggcaaatgatagggtttctcccccgtcaatcttcatatcaacagaaatcgttttgaattctggtgcgtatgacgtgattttgccgttgtctctcggtgtactatagaaacatacactttgtgggacattataacggtctgtttcaatgtacatgtaatcgccgtcagccattccccacacggtgtagagggatccggtatagtcaccaaaggaatttttaaaatcttccttcgtggtgtatcccagagagcgcaattgcataagctggttatgctgttcgattgcatcggctttttgttgttcctgtacttgcgcatcaatcgtttcttgccaggaattatacgcatagtaacccacaacagcgattacagccataacccctacagctttccagattttagagtcttcgtttttgttactcatgctatattccttttaagaaaaagggccgaagcccctttgttaacgaagataaaccacataaccgctttggtcaatcgcgcggtctgcgtcattgaagatattaccacgaatgccttttgctggtgctttccagcttgcaggtttcaggatattaccatcattatcgatgaaagcggcaacagaacgctgattgaacatttcaccagtttctttgttgcgagtatcctgaacaacgcgatgatatttgcggcctttctccagaaagaaaacagtttcgaaaggagaatcttggaaacgagcgttacgcgctttgtacattgcttccatgaaaggggctgctttttctgcgaggatttcgaaagtgttcatggtatatctcctaaagtgtgtttcgtttcgatgtaagtactatatcaaagatggttattctatgcaaggcttttttcgttatccatcaaatattttaagtgttcttttaatgcagggagttcgttcaaatggcgttgcttaactttctcgtactctttgcgttcccagttttcaagattgcttgccaacgcttcatcacaataagcgatcccgcgttctgcatcctgaactttctgtttccattgtgcaactgcttgttgataaagagaaccgttaaccatcataataatttcctcccttgtttcgatggggtaactataccaaagctaccccagaatgttttaacaaaaagtgctattagtaggtatccagtttatacattttgcaccagttcatgaattcttcgaaagtctgagtattaacacgtttttccttcttcactttcttagtgattacaggacggttagtaaaacgtttttgcattttcacagtgattgctactttatcgcccaggtcttcaaccttttcaaccagcgcccactgagaaccaatttcagcgccgaaagtcaaaccaacaatctcacctgctttaacgtgtgctgcatattttactttaaccattttcgtattcctttctctgtttcgtttcgatgaatacaagataccaaaaagcctcttgcaatgcaagaggcttctttaacaaaaaatgctattttatttctttgagcaatttacggatcccgccgccctgtgtcttatcaaagattttctttgcatcaataacagaagtgattatgtggtagttgttcccttttccgtcaaactcaaattcgaccttgtagtcactacgaaatttcacaaaaacaaattcacctgcaaagtgcttacggaactgcttttcgttaatgtccaaccattcctgtgtatcatctaactgatacatgcgacaaaacaggatcgaacccattacagcaatcacgacaaggatagctaacgcgaattctgacatcatttacccctgtttactgattgacggtgcaatgatttaggcacaaccggatttcggtatggtttgactttatggatcgtgggttcttccccaaccaaattaggaaattggctgttccattccatcgaaaatggatagggtgatgactttaactcttcgatcatacagtttactaaacggtcgccgattacacccaaagccgccccaataatcgctatacgcataaatcaccccttaattgtgtcaagtacagtaaaccagtcatgaagccatatcgttgttcttaccgcgatatacgttaacaaactaatcaatgataccgctccgcaaatagccagcgtaatcaacagccggatttcaaatttagtaaaattcatatcaatctcctttcttagaacccaatataacaaaagccctcaaccgaagtcaagggctttgttttaaatttttaccagttttggcaatcgaagaactataccaggatggatcagacgtgcatccggaatagaatcacggttgattttagcgatatcaggccaaagttcaccaacaccaaacagtttctttgcgatggaatataggctatcacctggttgcacgacatagcggtcagattcaatcttaaccagatcctggttaatgatatcatcaaaggcttttgctttcgcttcgttaatcgtattcccgtagtaatggcgatccataatagttaatgtgatcatcgtttctttcctatgctgttttcgctgtctcttctaaggatggaggttcttccagccccagagcataacgtttagcatagattagcatcaatgcatctttagcgcaatcatgaatcgaatcatgctgaatgaatccatctaacatgcctttacgtagtggacacgtggtcactccgcgagtcagtaaacggttttcaatagctgtacgcacatcacggctattccagaacacggtcggcatatcttcaaacgtatcaagtttccctgtcatagttcgtacaacatcggttagcatagaacgatcgaattcagggccgcgcgtataatcgtatgactgccaacgactcacaccgtcagccgctaaatcagcaaagaattgtcgatgaccttcgtacaaatccatgtcaatatcggaagggaacaaaaccctttgcgcttctttagattgctgtttccaccattcgatcgttttttcatctttgatgcgttctggttgtttccggatgtcaaatttgtactttcttcctttagcaatcagttcctgaaaggtaggcggatcataaggatcatcaacaaacggaacatagctaagttcagctagttttccttttggaaacgggccaatactttcataatcaaatacgaaatctacgggtaaatgactcattcgcgaccccgcttatacgattccatgaaataggccaatgatagcgcgacttccggagtaacatcaacggattcgatcatgcctggagttaccgccatcataccgaactgacgaagcccacaacgagcaatcgatttttccagtcggatcatgttttctacagcctctgcgaaattgtccagatgttcccaatcgtggtaatcttccattgtagaacgatcacttttcaaaatcagatcggcaaccaattcagcataaaggcgcggaaggtgaatattcatttaaaacccctcaagcatgtttttgttttcacgaatgttacgacccattttcaaagtatcaatgatcactgcatactcttcaaaagtgaattcgatatcttgtgaaatgtttccccacgtgtaggtcggcccgttaggacagtataacccaacttctttgtttgcgttgacaacgcagcgcaattttgcaaacaacaaattgatatcgatagaattgaacccttcgagataatcaagcccctctctaccaatacggtcaacttctcgcaaaatcttttctacatctttgactttaacaataattttcataagaacctcaaagggccgaagcccttagacataatcaacagtgaatcgtgcgcgggtagttcctacataaagcaactgcttacacaattcataatcggcgtatgcgtatgcatcgcgcgtatacatgtatgaatgatcatacgtgcttccctgacctttgtgatacgtacaaaccggaagcgccttaaccgtctggaacttgtttttgatttgccagaacgaataccagggggctttgtatccggtttcctgtttcatctttttatactgaaacgcgacgtagttcaaataatcgcctaaacgttcctgcataaccggatccgcgataacctgaatatccgctttcgtatcctcgaacatcgattctgttttcatcaagaaataatcgatttgcaccggatcgcatcggtcagctttgatagtatcagaacgcggtatgatttcaaggattttaatttgctcgttgttgttatagataacttcaacaaacgaaaccccattcacacggccttctgtcactaacggttcttgcatcacaacaacttcaccaacaatgaacggctgatcagttttgtacaagtgtttgcggatcactgcgtttaacttgtctacgtttgcgttagtgtaagcaaacatacggttattattcaggtcatccggagtcttaacacggctaaaataacgtctcaggaagtcactagcgttttcgtgcttcattacccctagttcaccattcatgaggggcattaacggcttaccgtcgcgtatagcgcgtgatacctggatgattgggtttccttctgcctgacgcataatcttatccatgcgaatgacatcaaaaatttcctcatcaaagaacggtgaaagctcggtgatcccttcggtattaacaggacggatctgatccttatcacccaatcccaggatcaccgcacaactcggaatagtacgcttgataatacggaatagttctttgtcaaccatcgatacttcttcaacaacaaacacacgacattcagacagatcagcggcttttttgcctttttgctgttcaaatactcgtaactcttcgttggttacggggctgattttcagtgctgagtgaatggtcgttgcatccatacccaccgcctcagagagaacgtttttagcctggtgcgtcggtgctgtcaaccagatcccactaatacccagttttttcaatgtttcaaacacaaattttaccagagtagttttaccaacacccggcccacctgtgatagtagtatggattttgtttctgatatttttaatcactcgatcatgtgcatttttctggtcttcgctcagatcgtcaaaagttaattcgctcatactttaatcaataccccttgaatacttgcgtgttcaataaaccaacgcatatctttctttttcttttcggttacggtttcaacttcttcctttcgaaagaatcggctaagaccactttgtttaactggattcatcttatcatgatattctttgataatcgaatttttatactcgttagcatcgtccggagatagaaacaacaaaggtgttaactctccttccttaatgaagggaattttaaacccgtctttatccttactaacgacgatataatattttgtaatcattctcgcccctcataacaaacgtagaatattccaacaaaccaaaacactgatagtataatcagtaaaagttttctttcaacgccatttacgtgaaacacacaccaaccgaaaagatatgtgatcatcgcgcaaacaccataagaaagaaccccaacagctactagcatcaaaaagtgccattgatcgatactataaatataataaaggagattatacatgatatcgaccgtaagcacaatagttgttcatgctcattatacaacaactcccgtatttgaaggagatatctacacgttcaaatacacttttcctatcgaacagatagttcaattaatgaaaaatagacatcctatcggatggattaccccagcaacaaaacatctactaaggaacaccatcgatggactaccgtaaaatttacaccaatcttatagaaaaagcaagagatagaacactaaattgttacacagaaaagcatcatatcatcccccgatgtatgggaggttgtgacgatcatgataatttagtagaacttaccgcagaagaacattatgtagcccatcaacttcttgtcaagatgtatccacacaataataagttgatatatgctgctaatatgatgtgcgtcaacgcaacacagagaaataataaagcatatggatggatccgcagaaagtggatatctcagatatcaaaagacaggacagggacaaaggcaacagaagaacaacgcaaaaagatgtcagaatcccataggggagacaaaaactctatgtatgggttacgcggtgataatcatcctgcttatggtcaaaaaccctggagaaatcaaataacaatgaaaggaaagcatgaatggaggtatgctgggattttctatgactggtatattaacgatattaaagctggaatctataaaagacaaggacacaagagaatgctacaagaattgcaaattgcaacaatctcccgtgttcctagaacatcaatcgagttattcaaaaaggggtggaacccttacgaagataccgattgggttgagtgggctaataatcaatagctgttggcccaacgacgaagattttcggcttgtttaagagcgtacatcttataaattgtttctgcatccatacccaatgcaataaacttacatagtacaaagtggaattggtcgatcatttcaaacagaacttctaaacgatcctcttcactcagatccgcaaatttagtattgcgcaattcctggtgatttgctttccacggtttccaaacaccggatgcaggtttaacaccgcgagacattccacccagagcggtatacaattcgcgggtttcgtcggcgatcgcgtcgtcttgcagtttcagccaatcaaggatttctccgcaagtttccagattatccggacgcggaacccaatgcagggtatcagacaggctttgctgtgcatggttttgtaaatccagcatggattgtaaaggatcaccattacgggccagaatcttttgatattcggaatctacaaattccagatcttccgggttaaccaggtgcgcacatgaattaaatacaggagttttatcagtagtcatatcaatctcattttttcggtgatttgtcccacgacttaaatcgaagttttgccgtgagtccagaaacagtattatctttcaaatactgcataatttcaagtttagttgcgccgtccgtttttatcatttcgttgatatctttggaaggccacggacatttgtcccacattacaaccttttctccagcctcaatcaatttaaagaggcggtgagtagtatccggatgacgtgcttcattgtcaagaacccagacacgcatatttttatacggaacctcagaaagtgcaagctgtccaccagtgatagcgccagcattatcaacaaacaggctatctaatggcccctcaagaagataaaccgtttttagcggatctatcgtatcctgtccgtaaatcttggttgattcttcacaggctttgattgtgatatatttcgactttgccccgtcgcgtaaagcacgaccctggaaagattcaattttccctttcttatcgaagatagggatcactaatctcggttctggttttgcgatcggataggtatccggattcaccgtattaaccagttgttgccattcgcgagtaaaccacaaccgatcccacttgtcacgggggatacaacgattctgcacatattttatgatcggatgttcatccggcaaggtatctaacctttcgcagaattgaagagtaggaataaatttcttctcttccttcggttgttctgtatgcgttggctttaacgaattgcgatccttaaacgattccatgagataatcacggtaatcgtctggataatattctttcaggaatacgctaaacggtacaccataaccacagttaaaacaaccacaattcatatgatcaccctttttagaagggtagatccaaaatcgttttttgtacttgtctttcattgagtcgccgcaaataggacaacgcgcattgatgcttaatgcccccgatttacgaacgatttcgctttgaggcagtgatcccatgattcgggttgcaaattctatatcaagatacatttcttacctcagttgactatctttagatcctcgtcgattataccccgcgctgatcatttcgtcatgttctttttggcattcaatacaataacggcaacccttcacgatagccctacgtttttcgggtatcggatccccacaatcaaaacaatgcgttaatgattctccgtttctgatttgagaacgtgcaaaatctatcgcattgtctattgttgcctgaatggtatcttgaacaccgtcagcagggccaaatccaaccgccattgtaaatcctcctaatcaaatgatttcaatatcatagactaagaggatttttctgtcaagaacttacttgcttttctgttccgtcaagcattaacttccaaccacgaaatgcctgtttaaacgaataatttattgcaatatcaattttatcagaaccttttcgacgattctgataaacggtcgcgttgtcactcatatacatgatacaaattggaaaccatgtataatcgttagcagtagcccagatagtgatattcagcggaggaattatcatttctttttccttttccctgcacgggtaacgcctaatactttcggcccgatgttggttactgctccagtagtcacaccagaagcaatcttttctatatcgccgccagaatcaccagcgaccatatcctctaacatacgccccttatcataatattctttgaggcgcggaacgttcatcatgatttcttcatgctcttgttctgtcagattgtagcgattgcgtagggtatcatatgaacttgttaagttcataaacccagtcatatacggaacagaattcattctacgcttgatatggcgtactgaacgatgaaaaggagaatacgcttctaactcttcttttgttttggggttacgaattacttcgccttgtccatcaaggatccccagtttataagcagtccattcagtccagggctttttgagtagccggatcatccggacgctatatgttaaatccatatttttaactaattgatcactcatgattattactctattgtgaaagtgaataaatcagatttggtttcaggttcaaactccatacaaacaacctcgcatagtggtttaacccctttccaatcctccaggtaatacccagtatctataccgcatccaggattcataacgaggccagtttcatcaagaaactttttgcatttacttgatgtggtgctgtcatcttgtcggaaacagtgtgttttcgaataccggaaatttgcagacatttgagggattatgaaagttccctgacgtgcgatctgtgatgcacgttcgattactttatactcaaattctgcccctgtatacttacccttaaaatcagaggttttgattttaccaaaaggcgggttactgatcgccatatcaaacacctgattaaattcagttgttaaggcgtctccatgcacccaggaggcttctggtacgatacgcttacctaactcatagtatgtgtgatttaactcaacacagacgatttcacgcggcgtattgtacatcatgtaatgaaccatagcgaaagataacccaccgataccagcacacaggtcaataacacttccacctgtgcaagcatcgattgtgaaatcgcgagcaagtccaataggggtaaagaacgcccctaattcagaattgtttgtaaacgcgccttcatgaaagttttcaataatgaacaacttctcttcgtaagttagcgctttgtcagagtgaaccagatccattatctgattgtgtttcttggtttccgctttcgttaactttgccattgtcccagctatacaataatgttgatttatttggatagaattcccatccgtctacatatccggtttcccaatcagtagtttgttcaaaaccacagatccattcatatacacccggaggcatttcgacagaatcaggaagcccgatatcttccgcactgcgtccacattcaaagaatgcatcatgaatgaatggtcgagataataccgtaacataaccttcatcgtcaacagctacgatccagcgcgaactatgaggactatcgaacttcggttcttcttcgtccatatccgcttttatttcagccttacaaaaatcaatattcatttcaaaccctctttaacaccctctttcatagctttccaggtagaacccgcttcaccattcagggcggcgaatacaaatagtaagatagcaaggacaagattcacgccagcaatcaccatgattttgctatacacgaaaatgtaaggcattgccaccacccaccaactaaaagaattaccagttacgatgttgagtgctgtaagtaagaaagtgataacgaatgcgattttcataatgtcctcctttgttatgattaaggtatcatcttttgcgaaagaatgcaatacctacagatacaaaaaagcccctttcggggcttaatttttatgcgttattgatgagataccgaagaacgttttttgcttgttcctcattacaaccaactttgaaaccaggttcgatagggaggaagttccagaggaaatcaacacttccttcaacgtcatctttgcctttttccagcatcgctaacagtaaacctttgtttttgatgctgtttacgattgcgtcaaaataaccatcgctgaaatcaacattcgggttcagcatttcgttgtaagggttgttgaatacgttcattttgaatctcctttgtttaactcggtatcttgtctacgtgagttatattaccacaatggagattcaggtcaatacctttttacgattttttgaaaagtttttcgtatttggcttttacccagcgatacatatcttcggccttgtcactggcaatcagtgagaacagcagatagatcgcaacacccaccaacacaacgcctactacaatgtagacgggtaatagaactgggaagagaacccagaaccatgacatatgcgagaagccaaatactttagccgctgcaaaaatcagtgtcagtccagtcagaagtttgatagccggaatcggaatcgttatagtcttagtcatttcattaccttacattctttatggggctattcgccccagtcaattaaaattgaatgtcagattttgcaatctgcgccattttatcacgtcgggtggattcagcctgtttaatcatcgggccttgtgtctgttctactgttttaggcatagtgttgccgtggtagtcagatttaaacccgtattcgctgttgtcggtatccatccagcgctgattacccttgcgaacttccaacttgaacttgttgaaagtgttcttatcgccataacgggatttgatttgcttgaacagttgcataccctgatcagctaactcttccgtctcaatcacagctaacataaaatcagccgtagcaggtaaaccagcggattccgcaacatcacccatactcacatccgaactatcccatgcagaacgcccaacctgtgcgcctgtccacattacggtattagtttcaacagcaaggccgcgtagttcttcggcaattgctttaaccagaatataggtattctcagcacctttaacacgggttgaagtacagatccccaggtaatcgacaatgatcacatccggaacaaactgtttcttcaatttaagctctttcacaagcgctctaaagtggtttgcacctgcacccgatgtagggtactgcttaaccaccaaacgcccaaccttacccgctttaaggcgctccattttgttcttatagtctgcgtatgtaatgttcccttcgtcgatgtcatccatagtcacatcaagaaggttagcatcgatacgcttagagcaaacatgctctgccatttccatagaaatgtaaagaacgtttttaccctgttgcagataatcagccgcaagagaacataagcccagtgatttaccaacgttaacaccagccatgatgatattcagtgtaccacgttccgcgccgcctttggtgattgcgttcaggatcgggataccaaacggaattttcatcgccttcgattggtaaagcatccaccgtttttcataatcttcgaaatagtcatgacctactgaactatcgaatgaaattgctaatgcttcctccatgatttcagggatagccccaacaccaggaagtttcttgttctgttctgccagtggtttttctgcgttagcctggatctcgattgcgcgagaaagagcacgatacattgctttgtctttgcaatatgtttccgtttccttcattagccaatctaaatcttctggcgcatttttcagcgactgaatcgcctttttcgtgtcttcgtagactacatcacttagatttcgtttgtcaagcgcaacctctaaagcagtttttgacggaataccgttgaattcctgtacatgtttatcaatgaggtcaaacaaaacttgtgcattgccttcaaaatattcctttttcagatgaggccatgcttggacaaaatacgtcccgttataaatcaggttagaaaatattgtatcaacgatcattgtattgccttataccaggttgctgaacatcatgaaaaagttgtaaaccttttgtttgaatacatcccataatgtcagcttaggctttgggacaactgaacccttttcaagctctttaatctgtgcataaattgcatcatgcaccagcgggatcaacgcttctttgtcttcgtctggggtactgaattctactttcagcccatgatcccaaaacaccttatgaatataaaccagatgcgcaacacctttttcatcgttaatcagaagttcctgaataacatctttcatcgcttcatcaatataattctttgctttgctctcgatatccatacattgcctcggttatggggccgaagccccatagtttttataaaatttcgtcgttttcttcgatatcatcaaatgattctgggatatcgtcatcatccagatcaggatctggaatgctatcagtgctgtataaatcttccagcgcggaaccatcactgatttcacgatctgggatcttatacttttcttcgatagctttcaagaatggttgatgagtaaacagaggacgccagaattcaacgctatttgtttctgactcacgccatttcttttcttcaacttcgagttcgccagtctcggtattcaggaaagcacggttgcgccagcctttggttacggtctgtacaaagttcatttccattgccagatccagaaggccagaatacatactaataccgccttcataggtaacatgcagcgggaattttgatttctctttcacgaatcgagatttttcgatgttcatgatgaaatcataacccactacctcagtaccttctttcacctgttgtttacccaggatgatcgcggtatcagcggaatacattaaaccagtaccaccggaaataactttcttgctgtacatttcttgtgtgtcataggtatgacagatacaaaccatcgggatatccaggtcagccaaataaggcgtaaccatacggaacatgccttttaatgcttttgctcgcgtcatatcctgtttatcgttatcagacagcgcgtcagcaagttcttttttacttgccgtgttgcctactgagtcaacgaatacaatcaccttatcaccgcgttcaagcgcgttaagctggcttacaacgtcattacgcaactgctcgaccgtcgtgatacgagtatacacaacacgatccggatcaacacccattgatttcagataggatttagtaacacctttttctgaatcgtagaacaggcacacagcatcttcatacgttttgagataagccgctacagtcagcaaacctaagttggatttgaagtgtttggacgggccagcgaaaagggtaagaccagaagttaggccaccgttaaacgcaccggacaacgccagattcagaatcggcacacgggttcgcgtgatggtaatattgttgaatacgtcgctttcagaaagtacagatgcagtttggctattcgagtttttgatcagtttttttagtagtgctttgtttgacatttaatttttccgatttattcattctcattctatatatctcactagttaatgaaaggggccgaagcccctagagtttaccagtcaccgaacaggtcgtttaaactggcacgtttttcataatcaattttacatacttccgtgatattagtcaatggactaataacatgtttttcaaacatacccggataatctacccatgccagaatatcactttcgatctctgacggtaatttattcccggattgccacgcgatgcaatcggcttgccacgggtttttatcccttagtggtagaaccattaccttttcaccttccatgattggtgtaacaccatcaataccagcagtgaaacggttaaagaacaacacccctttaatatggtttggtgttcccttgattggatagccagccccatcacgatatttcgaaatgttgttggcagatgatacaccagcaatttccctgtagtcaagttccttatattcttcttcgaactttttataatgttcgtgtaaagataattcaccttcttgcaggatacggcggatcgcttctttcaggaatactttcacagaggtcggagtactcgaacgctgtgtttccatacccatgattttcaatttcggtttttcatagcgggttccttcggagtcccacacgttagccgcatatcgttttttagcagtccagaaacttcccaacccttcggaacccaacggaggcccagaaatgatttcacgatccataaacatcaggtgttccacgttgttcatgtattcgcaaagttcacgataccctttatcgatcatcggttccattctttctttagcaaagcgatccaggaagtcaacccaatggttattatccttaaatttagcctcaccaccaacttttgcaatcacgttatccatgcaaacataaatggagtcagtgtcacagtaccgaacatatgcatgatccgtagtaccgcacaggtcgttaaggtattcgtttaccttacgttcaatccactggatagccaactgcccgaacatggtgatcgcgctggcgtttcgtagatcgaagtatcggaagtgttcattacccaacgcaccataaagggagttgatagaaatcttacggttaagctgtgcggtgttagcttgtgcgatcttcttctcacacacgcgcttaactgctttaagcatttgttttgtaagagttttcagaactgctttcgattcatcactgaaatctgtatagaaatcaaagtcaggatcaaccatttggttatgcgcgtctgttaagtgttcgagttcatgcttgatgagttcaagatttcgctcacccgccatcattcgttttttccacatcttacgctggtcaaatactttcttgatctctactgggatcacgcctttgatatcacggcggaacatccacccgttaggagaacagctaaattcatcgctagggcgcggcgcggtcttattaatatactcttcaagagcacgtaccgcaaaacttcccataatcgtttcagggctgatattcacctgtcggatgatggaagggtacaggcttgttaagtcaaacgataccatgtatttgtaaggcccaggaacgggatccttcacaaatgccccagggtaaggggttttagtatggcgtctgttttccggaataacaaccttatcttcacgcagagagttataaatgatcgcgtcccacgttttcagcggagacataacccctgggaagttaatttttgcatagtacgctacagacagaaccagttcaataaagtttcgtttaccgtcgatatcaagtacgcggataacgtcaacaatattgtacgtgatgtacagttggtgatcgcgctggcgtagttcagacagggaaccttcatactcaactttatttttaccagtttcgtattccgcgatcgcgtccagacggtaagacggttgcggggtaaagctgaatttcttatacagcgccataccatccatttgagcaacgccgaaaatatcatatcctaattgttcgttgccgtaagcgtcagtagtggttctggcggttactttaccaaacgggctaaaatgccttaccacgttttgaccgaaaatgttcaggtatcgcgtgatgatatatgcaatatcgaatttgtcagagttccatccggttacaataacaggggttcgctctttccaatctttgatatacgcagacaataacgacttctcggtctggaaagaccgataaacaattttgtttaaatcttcttcgctaatgtctttgcgatcaacgttttccgcgcaccattccgcaaggccaccctcaaccagatcgtatacatagaatttatcttcaatgctatcgtaatgggtgatcgcatcgattggatattttgcttcacgcggatccggaaattctggagcggtcacctcgatatcgatagaagcaatgcgaatgtgttcgcggttgtattcgatttcattccggtacatgtcagaaatgtaagccagtcggtaatcatccatacctagagcttccatcccaacatcgcgcatacgctgcatccagtttttagcttctttgatgctgtcaaactgttttttgaggcaaggcttgccgtaaatgtctttgtatggggtttctacgccattcatagcgtgttgatacattacgggcgcatatttcgtcttacgtacctgttcggtgccgttagagtcaacgaagcgctcataaatggtatctcccatttgttcaactgataggtaaaattcattcattggatcttgtcttctccattaatataatgttccattgtaacaccacctacagcaaattcaagtttactcgatgttctaaaaccaacaacccttctgctaacaagtcacggatctttctcagttgaacaagctggcgttcaagtttaaacccgtcgaataacatgctaaaaatactggaattgatactatgatattttgcttctgcaatgccctgattaaccatcatgatagctttgttaaccagtagtttcctttccgttactgtatgttcatccagttgacaggttgcaagggaaaccagatcatcataagcacgttgatcaataacgttatccatacgggccgcgaaaattttattcatgtaagtgcggatcattgcgcgtcctccattcttttcataaagacttcttttgcttgttggatcaagtccagagattttttaatacgctcatagaaatgagtggtttcaacttgattgcataacaatgtgtactctgaaatgttacgatcgtaaaatccaggaaagtagtgttgtgcatagctgtaagtgcgggtatctgacagattgcaagttaacgataacaagatgtcatcttttacaatcgggatgatcaaagtttcgttggatttgattgaatccatgatttcgttaatagtcataatatatctctcaatggtgtacacccaatataacaaagcccctgcacgaatgcaagggctttttgattagtgaccgatccggtacttgtacttgaggatccaatctgctttttgcgagtgagtcagtacgcggaagttgttttcttctgcaaacttcaacccaggggttacgatcttaaccatgccccactcttcgagaagtcgcgcaatgttgttccggcgtagttcgtcttcttccgtcatatcgacttgacgaccatcgagtttcaacagttctttaaaatgcacgataaaatacttaccttgctttttcagaatgtggcacgattgccagagcattttctttttgttgtttgcaataccaatacgggttagcgtttcacggatctttaaaaaagaatcgtcgctgattagttgaatttctaacatacatcaccattgtttaatcaatttttccaatttcttttgttcagctttgtttttcacaatacccaacaaagacagagcgacctttgcgtgttttcttttccaatcctcgaacattccgaggtctttaagttcctgcaaatattccatcgctgtacgtgtatttacactgtatttttcgcgaaggatttcgataataattttctcttcaaaatcttccgatagtttagcccatgcaccgaagcgtttagccttcctaacagagttgagataatagttatagtgcatttggtcagagatactaccgcctaccagattcatcacatacgcgttgtatatcgtgtctatgtgctggctcattgcgttgtctacaaagtacttatcatacacttcatcgataaccaacggcgttttgccgttgttgatttcgtctatgatgttaaacaaggtgttttctttatccttgccgtactctttgaccagttcttcaaccttatcccaatctttagaaagccaagcggattcatgcggggataactcttcttcatccagaaattccgccaggctcatgattacgcctcccagaccatagaaagcatcaggttcatcaacagatattgcagatgaatttctttattcatcgccagcccgtattgcgcgttgttttcgcctacaatctggatcagtgcgattttcgaatcctgattcacgatagggtaaatcgtatcagtcaattttccgataaaggtatcgtattctgacgcatatttaataacctcagagcgcaaccctttatagttcttttctttcaacagggtaatgatatgagacacatcagaaccaactatctcatttaggatccccgcatcaatttcaccacgtttcgagtagaacccaatcgctttgataatagaacgcgcatccggataatgctctttaacaaacgctgcaatgactttaggatcatacttgatattctctatttcaaggataccgaaacaacgcttgattaactgtttcatcagttcgatacgttcagcatcagacggaacaccgaatttaacaggaggacaacgagaaagcagagcactatgcacaccgttaatgttgttcgctgttacaataacagaaacgtttttactgtatgcttcgataaagctacgcaagtgtttctgtgcttccgccataccagaacgatcgaattcatcaatgatgataatctttccgcctggtttctgcgtcattgatgaagcaaaacgatccagttcattacgaatgaagtttacaccacagttcgaaccgttgacaaagaacacctcagcatcaacctcacgggccaacacaagcgcgagggtcgttttaccagtgccaggggaatcagatacaagggtcatgttctcaacacgcccagatttgattatgccccgcatagcggctttgtcaccagaaggtaaaatacactcttcaatcgttgttgggcgatagcgctgatcccatgcaaattcatcaggagatcgagagattttaccgtatttggtttcgatgatttcaatattttcactaagttccataatataccttcaaaataaatggtgtaaaagaaaggggccgtagccccttaaaactatcttacttgaatgtgctacttgcttcaagtacgacgacgtaagcaacgccgttatcagaagagaattttgcggcccctttggaggaaatctctactttgtaatcgctgttgatgaactgcatgttatcaatcttcatatcaaaattgaaaacattgtcgccttcatactcaccgacttcaacggagaaagttgattgactttctttgcttttcgcggtgatgaccagtttaccatcaatcggttcaacggacaggtcggtcagtttcatcatgcgagacgctttgatcagtttttcgaaatcgttagaggtaatctggaaaatcagatctgctactggcatcaccagacgttttttcggtttcgggatcgttgttgcgtctgctgaacgttcgatgatcttcatcttgtcgccgcgaatcacaatttcaccagttgaaatatcatgagtgatttccgcgtcagtgccgacgatgttcagcatgttcaggaatgagttgagatcgtagataccaacatcttcatcaatcacatcagcaatttcagcttctgcgtatacaacgctgttgattgatttcgtcatgatgaatgaacctttggtcagcatgatcgaagagttgatttgagaaaagtttttcaggatatcaatagtttgtttagagaatttcatattcagcctttagttttcaataagtgttacttaataagtgattttacaacggtttccgctgctgtgtcaagcatatcagccatttctttaacggttgtacgcttcggatcttcgcgtcgttcgctggtaagtttacgatgttccgcaaccactttttcatcaatgtcacgatagtgtttaaaacgttcctcttgaggcatagctttaaacagttcttttgtttcgtccgagagtttagcaacccaggatttacggacgcggttcatgtagtcaacaaaaacattactttcattcatatatttcttctctaacttagaattctttgagtgggggccgaagcccccgcttgtattacatgtctaacagtttatccaggtcatcatcaccggagctatcagaatcatccagatcgaacggtacgccgtcatcttcgcctaccggaaccgatgcaacaccaccagatgatttcacatcagatgtctgattgtcaaacttagccatttcgttatcgaagttgctcagttcgctatcaaggtcagcggaagcgctggaaccagcagaaccgatcgaactacccataactttattgaagcgagtggtcaggtcagccagcggtttaaattcgctttcagcggtaatcgggcggagatcgctcataccttcgaaaattgctttctgaacttcttcatcgtcgatgtttttgatcttagccggaacaccaaacgagctatcgtcatagttaggccaatcaccaacttttttcgctttcagggtgaagttagcaccatcaaacggacaggttacagcaatacccggttcatcaagttctggattaccgttaattgcggcggtgatcttgtccatgattttcttaccgaagcggtatttgaacaccttaccttcgttttctggagcgcctgggtctttaacgatcaggacgttagcccagaaactttgtttacgaccgatctggctcagtagcttatcttctggcccgtttttgttggctttagccttctcatacagatcgttttcggaaatgtacttacatgcaggacagccgtcataatcgccgtgggtagaggaacagttctcaatgtaccactggttgtttttcttgaaagagtggctcacgatacggacgaacgccagttcatcatcggaacgtgctgggaggaatcgaataacggcggaaccgtttttctgtgcgtccagggtcagtttccattctttctcatctttctggaagccggaaccacctttcagatttgctacctgtgcctggagtttagcgggatcttgacgtttaaaaatgctgctcatattctgttttctcgtttagtttagtttgattaacgtttgtttcattaagtttcgatattttatgatatctttttcagtaaggtcaaatatttttctgtatgcctttaacttaatgctaaagtcagaccaaataatatcatcagctacttgatcgtgtttatttatgatacctaaaaatgagtcaaaaatcaaaaacgattcgtaagatatcacatttgacaggacaagtttgcttatgtaggacgttgatgatttttcgctgtacttgaacaccagagacacggggatctctttcattttggcgaattcgtacacgtttttaacgtcatccacaaacacgttatctagtctttgtaactttcctatgtactgcctgtaaaagacaatactatcttcatcaacatcgcctacccagaaatccggattggctacgaagttggagaggaatataaaatagatttctttgaatgtaaagcgttgagctaattttacaaagaaatatctatcctttcgcttgttaaaggcgttttcactaactttgatctgccagttgtattgaaggacatcaaaacgcccctggaaatgagttttcatcgccagatataacttgtatacagacaaaggcacaagccgtgaattcgcctcgctatcagcaaacggagctttgaatctcacatgaagccgtccagagtggttgatgaactatgttcaagcgcaaccgatgggcgaagcatgtttcctttgatcgcttcgtcgctaatcttatcaaggatcgcgcgaggaaccgttttattcagcatcgcataatcaatagaattttcatccatccattgtagcgttgcttccatgtaggttgccccctcagaggcaaccagattttcgatatacaaaccgacttcggtcttatttccgatcatgctttacgccttatcgatcatatcatacagttcgatcagttcgttgttttcttcttcgaaagcggtacgggcctgttcgtgatacagtttgaacagtttcccgaaggtttttccatcgataccgaaatcggttttcgctttggatttgatatccttgaacgtgccgttgaagatctcaacttgagttttcacgttggatgcttctttgatcagttcttttacctgttttgctacatcagggtttgtttgtaaaaattctacactcattttgttacctcaaaaatcactcagtttttcgaacatacgggaaagtttgttatccatgaagtaacgttccattttggctttacttccggattttggagtattatacgcttcaataatcgaattttcaatatcttttggtataaattcgaaatcgcgtagttcctcattttctttgtaacgtgcggcccattcaggggtcatcaatgttgtcggatcgtctgcctccagccatgcctctaactcagaggattttaccgctggggcgcgttcaccttcaaccttcgtcacaatataatcatttctaattttaatgcaagcgatactatcttttttatcgcctttgatatttttgtatcgcagatcgttacgtggcgaaccgtacttaggcgttacccattttttctggggaggcgaccattgacgaacaccgttatatttctgtagttgtgtaaagtcgctatcagcagaaaccactaatactcgtctaccttcaccaacagcttttttcgtaacaacagcaattatatcatcagcttccgcgaattcaacctttaatccgagataaggcatattctgacggatttcttcgaacacaggattaaggaagttgttcagacgatcccaatcccattctgattcttcgtgttcgatctgacgacgttttttgtagtaccaggctttttgcctacgccagtaatttctgtcatcgaaggcaatcacgatttctggatactcacctttaaattttacaacgttaaaccgtaaagtgtcaagcaccagatgacgaatcatttcgatcgtgatggatgcttgttcctttggtttgaagttgttcatcagtgtagcgatggaaatgttagagatatcgatgaccatagtatcatcgggttccccttcatcttgcatcagcttgttcaagttaaacatgcttgcaaaactgctcatacatacctcaatttttcaaagaacggggttattgtagtaacttacgaaatgaagtcaatacaaaagaccataaaaattttgatcaataatacttgatctgatcaaatttatgatctataatttattaattaataattattttactacaatgatcattgtaggtcaagtactaaaatcaataaattttatataatttagatctgatctatagatcattagatctactttaaccttaaataatatagaatgaaatttgattttgtctacagttattatataatattcttaacttcaaagaggaaatatgaatactatgactaaagaaacaaccaatatctacgcagacaatgaaaaattataccctatcctctgtgcatggaaaaagcaaatcgccgaaacaggtgatcgcaaaatgcctaatgagttgggggctgctattatggatattgcaaacgggctatcacgtcgttacaacttcaaccgttattccgaagattggaaaatggatatgatcgatgacggaatttccgctgcaatctcaggactgcataacttcgatgaaactcgttataccaacgtttacggttacattaacaaagcatgttggcaagcattcgtaacacgtattctgtacgagaaaaaagagaacgcgaagaaatataaattcttccttgagcacgtttacgactgtgaagattcagatatggttagtattgcagacgaaggtttcattcaagatctacatgacaaactatctcagtacgaggcttccgccaccaaaaccaaagacaaggaagcggaagtattcccaacattggaagattttctatgaaagcaataattgacttaaacaaaatattaactgatatcgattacgaaattgacttgctaccctacttcgtaaaattagagttgcaaaacgtgggaatcccggttatcatcgatccaactgacgtaagaaaccccgatttcgaagtagaagaaggggttttgtcttatatgataaacgccgaaactatgatcatggagatcacttatgattgatgaagagaaagaagtactaaccagtgtggaagaagtggatccagaagaggaaattcaacaaaagatccaggaacgtgtagaagccgacgcattgaagcgagcacaaaaattcattaagaagaaccggactgagatcaaacgcctccgtagacatgcagaggaagccctattcaggggtaataaagttcagtatgtgtatgcggttaagaaacttcgtgatatgctcaaacagccgtatacagaggatttcattgatacgatgtggaacacttcactagcatcaattcgaaatatcgtagcttcacaacagaagcactaacaaacaagtagccccgaaaggggctatgagggtcttatgagaaagtacttaatgatcggggatactcacgctggcttgcgtcaggacaacccctggaatgaagaaaacctatacaatgtattcgtacaaatcgtagaacactgcaaagcaaacggcattaccgaggctttccatgctggtgatttctttgatgtgcgcaaggccaccacacaaaccacgatgaaattcattcgtgaacgtattgtgccactactggaagaagccggattacatatctatgttctggttgggaaccacgattgccagtttaaagacaagatccgccctaactcaccgcgagagattcttgatcagtatgattgcttcacggttgttgatgaaccgatgacagtaaatcttgatacttctccgctgcaatcaatcgatttgatcccgtggatttgtcaagaaaacacacagcagatttttgatttcatcaaaaagtcaaaatctcaatactgcttaggacactttgaactgtccggatactatttctataagaacagtaaagctgaacatgggcttgaacctgatttcttaaagaaatatgatatcgtgtattcaggccactatcatcacgctaacgaaggcgctaacgttttctatatcggtacacctcttaccatgagcgcgaacgatgaggacgaaaccaggggcttctatgagctatcttatggcgacggtaaacgtgaattaactttcattgctaacccagtatgccaccatcgccggatcacctatccggatcaaaaagatgttgatgttgcagattacaaaaattgctctgttcgcttgattgtacgcgaagttgataacgatttgcctaagtttcaaacaaaactggaagaaacagtttatgagttgaacattgtcgatcgtgtgatcactgattcagaagttgatactgactttgaaatcaaaagtgtatctggattgattagtgagtacatcaacaacatgcagatcactccagaagaaaagaccgaagtatctgcaataatgagtgcattgtatgcagaggttacgagcaatggaaatagttgattacgttaatattttaaacgaaaaagggcgatacaaagccctttataaaatgtttggattggatgtgattgttgcggtacaacaggattcccataatgaatatgtgtcattggggttcactctgattaaagacaactatcacgaaacaaaggtttggacatttactgtcctgaatagcatggatgaagattccgtgatatactgctttgatagcacgattacaaacatgattagtgatatatcccaaaggataattgatgaaactcaaatttaaaacattgacttatcaaaatatcttgtcggttggtaacgtaccgatcgtcatcgattttgattcagcaaagaaaaccctcattacgggtaaaaacggcggtggtaaatccactatgatcgaagcgcttacatatgctctctttggtaagtcatttcgcgatctgaaagtcgggcaactggtgaacagtatcaacaagaaaaaatgtctggttgaactgttgatcgaatacggcaatgatgaatataaaatcatccgtggacaaaagccgaaagtatttgagatctggaagaatggcgaaaaactgccggaagattcagccgctggtgattatcagtcacagcttgaatcaatgttgaatattaacctggtgggctttaaacaggttatcgttctgggtactgctggttatgtacctttcatggaactaaaaacaccagatcgccgtaaactggttgaagatttgttgtctttgtctatcatcagtgaaatggacaaactgaacaaatcatacatccgtggtgttaaccgtgaactggatacgctttcaatgcagattggacacgtacaacagcagatcgcaacacatcaaaagttcattgacgaacaacgggcaaaagcaaatcagaatacggcgcgttaccaggatatctacgattcccacgtagaaacagcaaaacagattaaagcgcaattagttgaacttcaaacccagatcgcagaatgtgtgatcaatggtgaagaccaaacagcaaatattcaaaaactgcgtgatggctatacacgcctctcaatgaacgtagaacagttgcagcgtcttgaggtgatgtatcgcaagggtggtgaatgtccggcctgtaaacagccaattagccccactcctgaacgcatggaagagattgccgagaatattaaaaacggtactcagaaacttacgctgattaagaacaaacaagatcagctacagaaaatcatggatgatttactaacacaacaacgtacactaaatgggctgaaatccaaatacgaatcactacgcggtacacttcaaaatgaagttgcagcggctaaacgtgttcgggctgtcatggataaagcacaggaagacgtggtgatcgacgaatccccagttgaaaaactccgtgaagatgaaaaggaacttgattccaaacgttctggatttgtcaaggaaaaatatttcagaggtattgttacggatctgctgaaagattccggcgttaaagcgagcatcgttaaacgttatattccttacttcaataaacagattgcgtactatctggatctgttgggtgctgattatcagttcactctggatgacgaatttaacgaatcgattaaatcgctgggtcgtaatgattttagttacgcatcgttcagtcaaggcgaaagagcacgtattaaccttgcgttacttatgacgtggcgcgatgtaaccagtaaaatttctggtgttgatttatctcttttgatattagatgaaatttttgatggggccattgatcgtgaaggtggatttgctgtgagaaaattacttgatgatattgaaggtaacgttattgttatcagtcatcaagaactggatccgcaagatttcaacaggcatattactatggctaaagttggtagatttactaaatgtacgattgtaaacaatgattactaaaaaatgggacgacgaatttcaagccgagattcgtcgtcggttttaccatgtaggcggggttttgtatcataaaacagagagtagaccaacggtgtctgttcctgctggctactattttaaacccggtgatgtggtaaaattcaacaaaacgagaaaaaagaatccgtacttacagatttgtatgaggtatgaaggaaaatctaactatctgtacgtgcatagagttgtctggtttttagaatacgggtatcaagttgatcttattgaccatattgatatgaatccattcaataatgatccttctaacctacgagaagccacgacgcaacaaaaccactacaataaaaaaggaaaatctaatacatcctcaatatataaaggtgtatcatgggataagccaacttgtaaatggaaagttggtatacaatacaataggaaaaagatccatttaggatattttgacgatgaaatagaagctgcaaaggcatatgatgctaaagctatagaaatcagcggaaaatacgcgaggttgaacttttcatgaatatgttagaaaaatcttttgaattagaaaccgctctggaaatagagcggttttatctccacaacaattttcttgaagaaaaacatatagttactatgaaagatgttgaggaagcattcaaagataaccctatagagttgacgcgaatcaagaacaacaaaagttctgtttggttcctcgaaaaaatctattgaccgaaatccataaatacagtaaagtagcccatgtaacgaaacgtgggctttgtttttatttgaggaacaataaatgatcactgaatccaaaatgacttatcaggaagcactgaaagttttgggcgcaactggtagcgaaaccagcgccgaaatgtccagactcttcaaacgcgcatccttacgcaatcaccccgaccgtggtggtagcaatgaattaatgcagaaaattaaccaggcttacgacgtcgttacaaaaactgggcctagtggcgcacgttctgagactgctggtgatgttcgcgcacgttatgcacgtcaaaagaaagaatgggaagaaaaagttgatgcttactttgtagtggcgaaaaactatttcagcaccaaatttaacgcacaggaatttgcggaatacttcaccaaatacactggattgcctaccactttcaaacaggaagtaacaaaaggtagtcacggtgtttatgcttcgttccgtttcacttctggtgatgcttactttgatttcggtttcaactgcacccctccgaatggacaagggttagccgctccggattcatctgcactgggtaacgtttctgttagtacctttgtactggttggaactaaaaaacataaaatggcaagccgtgattatcaatggggcaaaaacccagataagatcactccggaaagcctgttcccgtctaaaaaactggaaagcattttcagccctgtacagaaaaatatcaaatacaaacgtgctgattaccttgcatcattccgtaagctgttaggcgctgacattagcggaaacgatatctttgttgaagttggtacactgaaagttcgtttctatcgtcatgtaatgatgcgtaaaggtgcgtatgtgtttagcgcggtgtatgatcctgctgtatctaagtatcgtccggctgcacaacttcgcggaactatgttagaagacgaggacggcgcttgcctggatatgatcgttgatacgttcaaagagttgcagaaactgaaaccgagtgttcaaggcgttgtgaacgcgatcgataagatgaacgcagagtttgcagcgggacatcgttcagcatcttttgttaaacgtgtagctgcttaggaagccgcgccgaagccagaagagaagccaaaacgcactgttaatcgtatcggtaaagaggaatacttcgcagcactaaaagatattggtgctcgtgtaatgcctaccagcggttatgttgaatttgataacggcgctggtgttactatcaacttcaagcgtattgttgtaaaccgtaaagcatactactcattcagtagctttgatttcatgtactctggtcagaaacacattgagtggttgaaaggaatcgatatcgcagaagataccaaaggcgcaagcattagcctactcactgatactctgaaatctttacgtgggatctctgactggaacactgttaagagcgctttagatcaaatgaattctaacttcaaggcgggtaaattctccgcacctcatgtgaagaaggaagcagagcaaaaagcacctaaacagaaagacgaaatcggcgcacagcctaccaaaccacaggcggctaagaaagatacaccggaagtggaaaaatcacaggctgttcatgcagcacgtgagaaagcgaatatgaacaacactattcgtaaaatgatgactatgttagtcaaagcacagcgcaaagacactccggaagatatcaagaaggaagttgatgcagcaattcaattgtggcgcttgacttactaatcaaatgaactataatgggaactgttaacgcagttccctttttatttgaggaaaatattatgagttgtccaacatggttacgtttggaaaatctgaaagaaggtacacaaaaacggatttatattaatcttggttgggttcctcctaccgattttcaaatggctgagattttaatcaatgctgttaaagaagtaagcgacacttacgaatgggaaaggctctattttcctttgattggtttgtatatgacgcgaaataaatttgaagaaatgaaacttgctgttattcgcgctacgattattaattcccaacaaagatttactttgaaaaatgcatggagttctgaatgattattcaagtatctgtacagggtgacactctgactgtcaccgaatccatcaataccgctcttgctgtatgtcgtgaccatatctcacaaaatcctccagtgactgagatcctggaaattgatgtttgggatcagattgggatgatcgacgcatcatatggatttaccccgcgagatgaagaactatctcgtatcgaatcatggctgaatgaacaggaaacggaatgaaactccctaagaacacaacactactaacccgcgaaaaacttcactctgttgattggtgtcctctggatatcatgatttttgatattgaatctcgcgtgatcaatgcaaaatatcaggggtgtagtattttctctgttgaattcgagaagattcgcggatatgatgagaagtacaaagaaaaactgaaagttatgattgaagcattaggctatattgtaactgttgaagacaacaaaatgtggatcgcaatatgagtatagtaaaagcggtgtttgcgctggggcatgatatctaccacgatgatttcgcttttggatatcagcaaggcttgccgtggggccactgtaaagaagatttacagaacttcaaagaagaaaccgcagatagcgttttgatcatgggtgcaaatacgtttacctctcttccgggtaaacttcctggtaggatccattgtgttctgtctggttcaggtagttttttgaaaaccaaaaaaggcgacgttgctgattacgtgatccacggtggcgggttgtctgctgctattggtacaatgcaagcaacacacccagataaaaatgtatgtgtcattggtggtaaggggttgcttttagattcaatcaataataaaatggttgatgaagtagttttgacacacatttacggacatgatgtatataatgcccccgcatttaaacgcgatgtttcgtttactgcttctgaattgggtgatgcattgttaaaatatgaattttctgatttcgaaactcagtacatcaaagaacatgaacgcattgaaaaaatcatagtcgatcgatataaaaaggtataaaatgaaacaatatctggatattattaaacttgtacttgataacggtgttgaatcaactgatcgcactggtgtaggtactattcgtattttcggcgcacaagccagatgggatctaaacagaggtttccccgcaactacctgtaaaaaactattcttcaaaccgtgcaagcatgaattgcaatggttcctgtccggttcaaccaacgttgaagaacttcgccggatgacctggggtgaaaatagcgataagcgcacaatctgggatgataactatgaaaaacaagctattgatttaggatatgattctggttatctggggccaatctacggtcatcaatggcgttcgtttggttctctttatggggatgatgatagttattatggcggttgtggtgttgatcagattgcaaaagtcatcgaacaactgaaatcaactccagacgatcgcgggatcatcgtttctgcctggaaccctgttgatcttgatgatatggctctgcgtccgtgtcactgtttcttccagttcgttgtaatcaacggtaaactgtctctacagtggtatcagcgttcagttgatgtcttcttagggttgccgttcaatatcgcctcctatgctctcctgacgcatattatcgctgatatttgcgggtacgaagtgggcgatcttgtttggactggtggtgatgtccatatctataaaaatgcggttgaacaggcaaaagaacttttacagcctaaccgttcaccaatgccattaccgattctaaaaatgccgaaggtaaatagcttacttgatttagatcaagaattctttgactcgataaccttagaagggtatcataatcacggctctctaaaagctgaaatggcagtatgaaaaatggggcttcggcccctttcttaacaaggtaagagaatgaatgacattaaagtagtagtaaaatcctctggtgtacgccagccgtttgacaaagaaaaaatatacaaagtgctcaagtgggcctgtgatggtcataatatcgatgttcgtgcattccttgaaaatgtattagaactgatccgcgatggtatgactaccaaacaaattcaacgtatcgctatcaagtatgcagcagatcatatttctgttaaagaaccggattggcaatacgtagcatcgaatcttgaaatgtttgcattgcgtaaagacgtttacggtcagttcgatcctatcccgttctacgatcacatcgttaaaatggttgaagcggggaaatacgataaagagatcctggaaaaatacagcaagcaagatattcaagttttcgaacgtgcaattgatcatgataaggattttgaattttcgtatgctggttcccaacagttaatcgggaaatatctggttcaggatcgcgatactggcgaaatctttgaaacccctcagtatgcgtttatgcttattgcgatgtgtctgcatcaggaagaaactgggttagcacaggttacgcatatcgttgatttttataacgcaatttccgatcgcaaactgtctctaccgactccaattatggcgggtgtacgtactcctacgcgccagttctccagttgtgtagtaattgaatcgggtgattctcttggttctcttaacgctgtaacctctgcgatcgtgaagtatatttcacaacgtgctggtattggggttaacgcgggacatattcgcgcaatgggttctaaaatccgtggtggtgaagctgttcatactggtgtgattcctttctggaaacatattcaaaccgctgttaaatcctgttcacagggtggcgttcgtggtggtgctgcaacactgtattatcctttctggcatctggaagttgaaaaccttctggtgttgaagaacaacaaaggcgtagaagaaaaccgcgttcgtcatcttgattatggtgtacagcttaaccagttgatgtataaacgcttaatgaatcgtgattacattacgctgtttagtccggatgttgctaacgatcgtctgtatgatctgttctatgaagctgatcagactgcatttgaagaactgtatgaaagcctggaaaaagatccaactgttcgtaagaaacgcatcaaagcggttgacctgttccaacttttagcacaggaacgcgcacagacaggacgcaaatacattttcaacactcatcacgtcaaccaacagggtagttttacggttcctgttcgtatgtctaacctgtgttgtgagattgcgatcccaacgtcgccgctggatgacgatgataaaatggctggtgaaatcggattgtgtacgctaatggctatcgttctggataacgctgatatcagcgaattcccgaaactcacgcgtattgcagtacgtgcgcttgataacctgttggattaccagaactaccctgtaaaagccgctctgaaagctaaacagcgccgttctctgggtgttggtatcaccaactatgcatcatggttagcgagcaactattgcgactactcagaagcgtatacagacaaagttcatgagctaatggaagcgtttcagtttaaccttctcgttgcttctatggaactggcgaaagaacgtggtgcatgtggattgtacaacgataccaaatacgctcgcgggttactgcctatcgattggtattgcaaaaccgttgatgaactggtagcacctgtttataattgcgattgggaatggttacgtagccagattaagaaatacggcttgcgcaactctactctttctgctttaatgccttgtgaaagtagttcacaggttagtaactctaccaacgggatcgaacctccgcgcggtttagtgagtatcaaatcttcgaaagaaggacactataaccaggttgtgcctaaccagaataaccagattgatttctatgatctgctctgggatatggctaaacgcggtaacaaagggtatctgtctcatgtagcagttatgcagaagtttgtcgatcagtctatttctgcaaacaccaactatgacccggcaaactatgaagacgggaaagttaaaacagaagacatcattgatgatctgctgtatgctaactactacggtgttaaaactctgtactatcataatacgcgtgatggtgctggtgatgaagaagaagccgcagaagattgcgcgggttgtaagatttgattaatgccccttcgggggctttttaaaggtaaagacatgttaacagtaatgaatacaaacccagatcataaccacttagaacaacctatgttttttggtgaagatactggtgttgcacgttatgaatcgcagaaacacaaagttttcgaaagcctgacgcaaaaacagctttctttcttctggcgtccggaagaagtcgatctgtctactgaccgtatgcagtatgcaaaacttcctgaacatgaaaaaatcattttcgattctaacctacagtatcaaaccctgttagataccattcagggacgtgggcctaacctcgcatttttgccaattgcatccgatgtgagcatggaaacctggatcgaaacgtgggcgtttagtgaaaccatccacagccgtagttacacgcatattcaacgtaacttgcacattgatccttctgtacagttcgaccaaatccttcgcaatgaagcgattatgaaacgttctgcatcaatgacacggtattatgatactctgattgatgaatgtcataagctgaaaaccatcatgatgctacaggaacaggttagcggctataaaccaaatgatccggctgtcgtgtattataacgagcaatacactaaacaggccactaagtgcaaagaagctctgtacctgtgtatgcacgctgtgaacgctctggaagcgatccgtttctatgtgtcgtttagtttcacctttaactttgctgaacaaggcaagatggaaggcaacgcgaaaattatgcgcctgattgcgcgtgatgaagcattgcatcagaaaggtactcagagtaaaatccgtttgtggcaaatgggtaaagatgatccagaaatggttgaaatctcccgtaggctgaaaaaagaagcaacggctatcttcctggaagtatatgaacaggaaaaagaatgggctgaacatttattctctgttggtgatgtagaaggtgtatcgctgaaaagcactatcgcttatattgaacaccttacagatcagcgtatgcgagcggtagggcttgattcaccattcaccccgatccctaacccgtatccgtggatgaataaatggctcaaaagtgataacgtacaggttgccccgcaagaggttgaagtaagttcttacctcgtcggaaacctgaatactgaaatcagtgatgaagcgtatgcaaaatgggccagcaaatacgcgtgattgtcgggtagtaaacaagtacaaaactgattgggatgtcgatattcaaagaggtacgaagttcggcaacccttatcacacaggaaccaggggagaaaacattttagcgtttatcccctggttccagaatcaggttcgtactggggcgatcacgattgaagaattgaaagaacttgatggaaagaggcttggttgtacctgtgcgcctcttccctgccacggtgattacatcgcgcatgtggttaatgttttgtgtggtaagaaaagatcacttgactttttggatatataatgtatgaaatctgaattcaacttaacccttgataaatgtggtcgcatcgatcgaagttttgttaagtgtggtgaacttaggcattgtgtttattttattgcaattaacgatgaaatagtatatgttggtaagtgtagggatatgtggaagcgtttagacacatatcgcaatgcaaagtattggagagaagccaaccccagcaacatcttaaaaacatgtcgattggaaatggctatcaaaaaacgaaaaactgtgaaacttatcgtgactactcacgatgaaaatacatatcatgattatgaaatcaacatgatacgaaaatacaaccctgaatggaataaacagcactatgacaaaggcacaaactaaaattatcaataccctttacaaacaactcatgcagttgtgtggtgaatccgaaacatttttcttcgttgatcaagtaaccgtgatgggtacacctgttcgaatctttaactatcgcatggcctcatatacagactggctaaagcctggtgctctggaatgtcgcggtatcatgtttgaaatggatggagatacccccgtatcaatcatcagccgccctatggagaagttttttaactatgccgaggtaaaggcatgggaagcgcttaacgagtctcctattgaattaggcgaagttttagacgtgatgattaaagaagatggttccttgatctcaactttccttgacggtggatttctggcggtcaagtctaaaggttcggttaaatcagaacaagctatggatgcgcacagcgtgttaatggcaaatcgtgaattgctgacccgcttaactgagatcgctaaagaaaactatacggtgaacatggaatacgtttccccgaaaaaccgtattgtcgttggttatgattctcctgatctgcgtatcctgaacgttcgtcacaacatcacgggtgaatacatcccttatgatgaactctttgctgacgcgctgttacgtgcgtatctggttaagcgtgagaatatcgaagtactggatctggatgcattcgcaaaagaagcatatcagaatgaaggattcgaaggctatgttgttctgacaacgaaaggttttgtaaaaatcaaaacaaactggtatgtcaatctgcatcgcacaaaagatagcattaccaacaataaggatcttttcctaaatattgttgagaatacggtcgatgacctgaaacagctattcagttcggatctggtctctctgaaaaagattgacgatttcgaaaaacttttccttgatagtctcaatcgtttgagtgcaaaagcgttcaaagccattgaagataataaagggaaatcgcgtaaagattttgctatcagtctaagcgcggatttgtcaaacgacggtcggatcatcttcgggcctcttatgaagtacttcgaagaaaccgatccacaaaaactggtcgatcgcatcattgaaatgatggttaaaaattacgaccagttcattcctggagagtacaagtgaaatcatttggcgcatatagccgaacgatagaacaagaaaaagcagggattgattccctgctttctttcgttgatgttttccccgaaactggaaaaatttactggaatgataaagcatatcataaaagtaagagaggaaaagaagcgggttctattgtttgtgaagaatacccttatacgaaaataaagtatgctgggaaaaattacatgaggcatagaataatattttactatgttcatggttacttaccaatcatagttgatcataaaaatggtcttgattttggtgattgtattgataatcttcaagaatccgatcccgttcataatatattgaagaaaaacaaaaccagaaaatctaaaactaccacatcaaaaggggttgactatcgttcttctcgtggaaaatatagagcacaaatacggattaatggtaaaacgaaacatataggatattatgatacagaagaacaggcgtctatcgcatatgaggaaactttgaatgaatatcaaaagcatcttgggtatgattaatataaaatcgtggatatggcctattattgttgcttgctccctaatagcccttttttacattgcagttgataccaaaatagaaaacaggcaattgtctaaggatatcaaagcgttacaagctgatatcaagaaagtaaaagagacaaacaacagtaatacagtgatatacgtcgaacagaaaggcaaggatcagcagttagtgaaagatgccggacgtaaagatctgctgtttaaaaaaccaggactgatcgaaatcaagatcaacaaatccttcgaagagtatatggcggaatacgacaaatgaaaattgcaacgttagcccttgttctgggcgttctgttggtcgggtgtgctgagaagcccccagaaaagattttgcctacgctccccgctaaggtgaatccggtgaatgtgaaatggaaagtggttgcagaagtccgagagattgacggtaaaaaataccttgtaatgccctatgacggaaatccttatgttgcattatcatatccagattcattgatttttcgtagctggatgaacgacgttaaaagacaaaaggatcagaccgataatgttctgtgtacgttgggataccctgagaaatgcaaatcaaaataactaaaacgttttttcgtgacataacagaaggaaaagtttatactgcgaaaaaggataaagaaggtctatggatagaaaacgattggaatcgtgatatgtggctcaatctgacgaatgagtataacaaagaactaattgaatatgagatagtgaaatgaatttgtttatgactattggcgttcctggtagtggaaaaactacctgggcgcatgagaaagcccgtgaattgggtaatactgttacgatctctcgcgatgatctgcgtagctctttgtataatgcgggtaaaggtgctggcggatacaaatacaccaaagcgaaagaagacatgattgcagaaatgcaggatcacgttgttatctccactctgaaagatggtaaaaacgtgatcatacacaacacacatctgaaagaaagtgataaaaatcactggcgtgaaattgcattggaacacaaagcagattttcatatcgaatactttgatgtgtccattgttgaactgcttcgccgtaaccacaaacgcggctgtgatgcattacccgtttcgcgtgtttgggaaatgtttaaccagtatcgtaagatccgtgggttcgtaccagcaatggaaattgttaatccccacaatcagaagtgtgtgatctttgatgtcgatggtactctaaccaaagtgggacaacgtagcccgtatgactttaccaaagtgatcaatgatccgccaaatatcccgatccagcaactgtttcacctgtacaaaaatgcagggtataagtgtgttgttgtgtctgggcgtgaaggtaatccgcaatgcgcacatgatacatgggttagcctgttgagttatggcgttgaaccggatgaaatttttatgcgtcaagaaggtgataccaggacagattttgaagtaaaagaagaaattttgtttgacaagattttagataagtattatcctgttattgcagtggacgatagagacactccggtcgggatgtggcgagcaaacgggattccgtgcttacaagtcgattatggtgatttctgattgacatataatgtgggtatgttaaagtacccacacaaaagaggattatattatgaacgttattcgtgaagataaacacatcatggttgaacttggcgatcgcattcgcgtagaaaatctgggcgattttaaccaaaaagttcgtttgttgtgccaaaaaattgctaacaaaattcaggaacagggtaaagctccgggcgggtttgaagttagcgccactccggtttctcagtactcctatattgtgtatattcatgacgtggatactaacagcacccaatctttcgggctggtgttaaatcctattactggctacgttacatgggcggctgtattatgaaagtaaaagtaattgatagagcgatgatcacggatgaatctgtatacccagatcctcgttattatggcggtgttttcggatacatcaaaggaactgatattgatgtagtaacaagtccgatcgccgaatacgatatcaacaaagatcagacagaagttcgcgttactacaatcaacggttcagaatatatcgttgaagcgactcctgattttatcaaacagttactaaaggtgatgaaagatgcttgatcatcctggctctatgagcatggtgcttctggaagcattaaaagcatatgatattccttgtcatttcggtgaagtaactgttaatactatcattgacgaaatcgacaacccaaatactttcattgcttgtcttgttcgaaaattcacaagttgttttcgaccgagtccagaaaaagtagtaatcagttctgtttctgcacatcatcgagtgttagatgatggaaagattcaactttactggaaagttctttatcacgtggtgtatcatgaagattgatgatattatgtttatgcttagagcaataagtgcttctaagttctctcaatgtgtctctgttaatgttggtgctgcattgagaaatggtaacgggcgtgtgtttgtaggcgcaaataatacggttgatcctagtcatcgttgtacagatcagtgcaatcacttattagatgataatgggaaactgagtgaagaaaagcgccctgaacattcacaatggtcagatcgcaacgaagtacacgcagaaatgcgcgttattatgctggcggcgtctcatgaacaaatcaaagacgcaactttgtatacaactcattccccttgctcacaatgtgcgaaaaatatcgaattttgtgttgcaacaggtatgattaagcgtgtagtatatctacataaatacgatcgtggtggcatcgagtggatatggcgtctacagcaatacggtgccgaagtagtacaacttgaccccgaagaaatgaataaacatttccggatcaaataacaaatgagtaaatgtatgtctgaactgagtgtaaaagcatcctttgaatatgttttgattgaaaccaacgctaaagcggctggaactgaaattgtatcaccttctggtattgtgactggtgttcgtcaacacggcgaggaaccgatctacggcacagtgttatcatgtgggccggatgtaccggaagaatataaaaccctgcttatgggtaagcgcgtaccgcttcctcatgcacaaatggcaaacgtgccggatcctgaactgattgcaggaaaggcaacaaaagaagaagctcgcaagtatccggttaaatatgtaaccgcacactataaagcgattcaagcaatttacgaataagagatccaacatggctaaacaaattcaagcaatcatcgccgataccgtcgcaaaatctaaaaaacttttcgacaaaggcgacatcctcgaagcaccgacccgcatcgatgtaatgacttcaatgatcattgatgctcaccagggaaaactgaattcccgtgcttcggaagtaatggaatacatcgtacagttcgaggatgtatgcaaatacgccaaagctgttgatccggctgttcgcgaaatctaccgcaaacagttctaaaaataacggccccttagctcaataggtagagctaatcactcataatggttaggttcccggttcaagtcacgggaggggccaccaaacaaggcaaggcacttagagaagcgggaggaacagaatctgattctgttggttgtaggtgcaaatcctacccttgccaccaaattagggtgcgtagcgcaatgccgttaaatggttcggaatatgcaacctttctcacggagaaggctctgttggtatccggtaataggttccccggaatgcggggtgaagtaaagaaacttccagcccactaatttaatgaggtttatatgaaatttcgtgaaactgtgaaataccataatgcggtcgaacatacgcagatttttgttgatatgtctcctgcaaaattcaaagaacgctatggtatgacatttaatgaatggaaaaatggattacccgatggggattatcgaaaaaacttcaaattcagtgaatgttatgtagatgacgatccttacgatctggatatttttggtaaaacaacgcctctcattgagaattcgccagaacagctttacgaatcttgtattgactctgcatacgaaatttaaagagataacatgaaaaatttacaaaaactgtttgaaatgtctccggcaattagaaaaatcatcggagaaaatagcaatccaacgaatcgcaataaaaaattgatggaactttttgtaaaagagttcgatgattttgattctgaacttcataaagcgcttgaggcatattccaaacaagggttctttgcatcgccgcaagtaaatagcaagaaagagtatagcgaacgattctttgattgggagattgtcaatctcgttcgtagaacaaatatatctccgagcaatcaccaattgatttctcttgatacttcggtattctttatccagtatcttatcagtggtggtttcaaaaatcctgaaattccgtttacaaatgaagcggttagcagtgaatttgatgaatcatttgtatacatcaacacaaacaaataatcaaatggctatcttcggatagccttatttttggggtgtctatgcgctttttaaagtatgcaagttggatcgtactcgtccctcttgacattattactggagtattagcaattctgtttgccccgtttgttgtaccgttctacaacgagaaaacagggcatcttcctaaaggcttccggtggatggaaaccttcgataatcctattgatggtgatggtggacatatccgccgttgggcgtctatacgctatcatctgggggattttggggtatacatgcagcgtgttggctggttgtggagaaacaaggcttataacttcgcatatcacgttttaggacgtgaagcgacaagcaaattcaactggaaaggcaacccaaaaacagaaggtgggccaaaccccgtaaatcatggctatctgctcatgtggaatgaatcagcatggggtttgtacgtttacaaaccgtggctacagatccacaaagtgcaattctgtttgcgcgtttatgctggatggaagctgaaacaagaagttagcgacccagttaacctggatcgtgcaatgctggcgtttcatttcaacccgttcaggtattatgtaatcaagtaaaggtaatacaatgaaagcatttcaaattttagaaggtttgcatactggtacgatctatctggaagaaggtaacgacgttcggatcgtagtatcaaaaacattaactatggattctgtgatcggtaaagctcgcgttactccgtttgcaaagcgagagattgagatcgaatatcagccaactgttaaggtggaaggtggacaacatttaaacgtaaacgtgttgcgccgtgaaactctcctggatgcggttgaacatcctgaaaaatacccacagttaacgatccgtgtttctggttatgcagtacgttttaactcactgacccctgaacagcaacgcgacgttatcgcccgaacctttacagagagtctataatggcaattgatgatatcaagggttataaaccccatactgataaaaaagtagaaacggtaaaccgtatcaaagatgctgaaaatgcattaggtgcaatcctggaagatatcgaacagcgactatcaaattcagatattgattcactgatagaggaagaattagatgaggtgcttgaacgtatccatcaaattcaactagcgaaagaccgactgaaagaagcctctatgtgggcgtgtcgtgcggtgtttcagcctgacgaaaaatattaaaaatcaagccgttgccgaaaggtagcggctttttcttttttggtgtaaaaagttgttgactcccttctcacattcccttatagttaatcccgtagacaagaaaacacttttatgaggatgacattatgaaacgctcttacaacatgaatgaactggttttcttcaaaactcgtcgtgaagcacgtgcttacgttctggcggctggtaaaaatacttctgctgctatcgatatgggtactgataaagctgttggtgctcgttgggccgctgttatcgttatcgctgctccggttactccggttaaaactctggtacttggtgcgcgtcacgccgaaactcttaacactgctgcaagcggtaggggccacgaagttaaagtgttcaagaagcgttcttatctttcatgtgcaaggggttaactatggcacgattcatatataaagtggaatacgaaaatactgagttatctgatacctttttgaagatgattcgtgatcacgggcaacgtctggaaagagtaacgattgatactgcgtttgattgtcctgttgggttggttctaacattatcttgcagccccgcaaaagaatcagcccgtgtcgaaatgttacataaactaaatgcattttatgaaggtggtagtgtatggcgagtattgtaaaatttttcaccgactcagtgaaagaaattaaaagcgctctggaacaatggaacactcgttgtgatgtatccattaaatcagagtacgaaacaacttatgatcgttatgatccggcccgtggtttgcacaataacccccatgaggtggaagtgtgaaatactacggattcaaaacgagtcattttggtaaagcgtatcgcacagaaaacatcgatcgcaaacgtccgtactatgattcgttagtacgagcgggacgtaaacgcgctcgccaggaagggaagaaagagggtgaagatcgtggataactggaaaacatggatatcaattatcgttggtgttatcatcggacgcggtttgtatgatttaatcttttcaataggggttaactatggacattggttcgggtagtcagtacccatcatgcgctttaagcaactttgccccgcatccgtttacgttcgacggggtagaatgcgcatcgatggaggggcttttacaaagcctgaaattcagcaatccagacatgcaagcgcatgtatgtacgctggttggtaaagccgccaagttcaaaggcaagaaaaagaaatggtatcgcgatcagaccttatactggaaaggtacaccgatccatcgcgaatccgaagcgtaccagattcttattgaaaatgcgtacaatgctcttttcctgaatgacgggttccgccgtgcgctggcagcaaccggaaaaagtaccttgacacattcaatggggaaatctcgtatgaacgaaactattctgacagaacgagaatttattagaaatttgaacaggttgagaaatttgttatgaaaagcgctgataacctaaaaaaagaaattgaaggaatcaagaaattattgcattatatcgatgttgatatagagactggaatatgtacttggaaaagacccagaaaatctataaatgttggtgatgttgctggatgtaagaaagaaaaatatcatgttatttgtttcgattataggttgtatagacgacacaggattgtgttctattttgctaaaggttacttacctcaagtagtagaccacattcatggtgttgaacatggcgacggtattgataatttacaagaggcatcgcaaagacaaaacgttattaaaaagaaaggacagaaaaacaacaaaagtggttatcgaggggtgtgttggtcgtctcgtgctgaaaagtatcgagcaactataggtattgatggaaaacaaatacatttaggatatttcgatactccagaagaagcaagtaaagaatatcatcaaaaagcgaaagaaacttttggtgatttttataatccattggttaaatgagatctgttatgagtgaaaaagaaagagtagaatgcgtgttcctgttcaaaggcgcgattaatccattagcgttactgtatgcacaacatgcattacgttcaacgttgattcagagtgttatctataaagcaggtgtgtattatgttaccatcggcgcaaataacatggttgttattgaatcctatgttaaggaatgtgcatcaaacggcgttgtctttgataaagtcgattttgatgcaggggtagatgctgtttatatgtataagggttgatatgagttacgtagtttatttcgattgttcggatctcgatccgttcgtgcttcaacaggcaaagaaatatcatcaagatgtcgttggcattggtgtaacaaatgatgatatgttgtgcatcgaatttgaatattatcggacatttgagcgtgaacaattcctgggtgaattgaatgcattcaaaagtacccttttctttgatcgttatgaggttatatcttgacagaacttgatgaactcgttgacagtttacgaatagatttcgaaactggtaagtgtttctgggctaagaagataaccaaaaagactgttgttggagaagaagcgggttccgtccgtcccgatggttattgtagaatccggttcaaaggaaaatattactaccgtcatcgagtcatcttttatgcacggaataggtttcttcctgacgttgttgaccacgtaaaagaggttgacaatggtgacggtgtaggtaatattcaagcggctacgcatcaacaaaacatgatgaaaaagaatgtacaatccaataacagttctggttgtcctggtgtatcatgggatgcacaaagaaacaaatggattgcatatatcaaaatcaaccgcaaaaataaattcatcggtagatatacaaattatgatgatgctgtaaatgctagactaaatgtagaaaaagaactatttgggaatttttataatgcagaaaaaagaaagaccagtaatactaactgatattgacggcatagccgtaaaatggcaatcgggattggcgttctttttgtctaagcacaacatgcctactgatattgcattagaaatggttacagatgaaaaatttcgtgatatgaccgaaatcttcggatgtgatcagcagttggctaaaatccttatggaagaatacaataacagttctttcattcgttatctgaatgcgtatgatgatgcattgattgtgatcaaccgtctgaaaacgcagtatgatttcgttgccgttaccgctctgggaacaacaccaacggcaagccttaaccgaattgctaacctgaatactctttttccttctgcgtttaaagaggtgatggtcgtgggtcacggtgaaacaaaaactcatcgttacctggaagcaaaagcaaagtatggtaatcgtctggtttgctttgtcgatgatctcgcgataaacttaaacgaatgtcataacgtcattagtcaattgccgttattccatatgttacgtggtgaacgtgaagaaacaaatgcacctcaccagttagtaaaatcgtggtttgaaattgaagagaaactaaatgatcttgtcaatccttaatgaacttgcttctactctgaaaactaaagagaaagaagcaattttaaaacgtaatgcagataatgaattgttgaaagaagttttccgcattacgtatacaaaacaaattatgttttatgtgcgccagttccctttagtagaagggaaaccaggaacaacaccgctttccgatgcaatcaaagcattgctagaagatttagcaagccggaaatatacaggcaatgcagcgcgtgatcgtttactggatattgtatcatcagtgaacattaacgatcgtgaagtgctacgccgtatcattaaccgcgatctggaatgtggtgctggcacaaccttaccaaacagggtatggaagaaactcattcctgaacagcctcaatgcctcgctacgccgtttagtgaaaaggctttacgtcgcatcattttccctgcttactcgcagcttaaagccgatggtgcgcgttgcatggctgatttgctggaagcattaaaccgtaaggtatcgagagcgggtaacgagtacgaagggttaactcagcttgatatcgatctgaaaaagattcgcgattatctgggatatgatgtagttctggatggagaattgatttatgttccttccggaaccgtaccaacattacctgaacctgaaacagacatgcctttttctttatctgctttcatggacgatgatgataacgacattgcgttatttgcggaagaagttcgcaaagtatcgaccccagaagaagaacaggccgaggcaaaacgcgaagaagggaacgggatcgtaaacaaatctctgaaagggacgatcaccgaagaagaacagcgaaacattgtttatgttgtttgggatattattccatatgaggtgtattacggcgaagctgaaagtgttcagacttatgatgagcggtttagcctgttgcgtgatatcctcctggatctttctctgccttctgttcgtttgattcagtctaagctggttaataacattgcagaagcgaagcaggactataacaattaccgcaatgacggtaaagaaggttctattctcaaaaacagaaacttcaaatggaaagattcgcgagtagccgatcaggttaagctgaaaaacaaaaccccgattgaactacggatcattgatatctacgcgcacactaaagaagaccataaggtcggcgggtttgtggtggaagatttatccggaatggctcgaacgaataccggatctgggttaactgataccgattatcgttacgatgatgatggtattacccgtgtatacattccattagatgaacgtggtgaactggatcgcgaatacatcatggcgcataaagatgaatacattggggccattgtagaaatggaagttgacggcctccagaagtcgaaaacgcgtaagaaaggggaaccggaatacagtttcttccttcctattatcaagaagataagaagcgataagaccgaacccgacgatattcatattgtctttgcagatctattttaataaaaagcccttgactccggtcgggggctttgttatattgcatatcgaaacgtaaatcactgagagaatatattatgactagtagttatcagaaacacaaaacccttatggcaaacctgtccggtaaacatatcgacgaagtaaaatctctgctgacagtgaccgaaggttcccgattcgaaacaaatcacattatcaaaccttctgtgaagaaagtactgaaagtgatttaccgacatccggtgtatcagtgcgttcatatcatgaacagcaacgcatttattttcgtatataacgaatccgatgataagtgtgttggtattttccgaaaacctaactttgaatgcatgagcgaagcggctgttgcaaccccgatcgttgaagaatatccggattatgttcaacgcaacatgcgttatgtgcaatcccgacttgattatgcatacgatttcaattctgacgcggtagaagcgctggcggatatcctttgcaaaaaccagaaagatcgtcaaatgacaaaatatctgactgatccaacaccgccaacaattcgaatttctgttgaagttccgtttgaaaatcatttcatggcagttgaagcgcttgctaaacttggtttagaagtgaaaacagaagccgtttaatagcactttttgttaaaaagcctcttgcaatgcagggggcttgtttggtatagtgtgttcatcgaaacgaaacagacaaaaggaacatcacatgaacttcatcgatatcaacaaagatttggaaggtaaaaacatcaaactcgttaaccgcgaaatgttagagagtcttggtaacggtggcgaaaaattcagtgaagaattctataacaatttatcattgatgacggtcaagcgcgttgatgttcagggtggttccggttgggtttctgcaattccggtttccctggtagatcaagcaacatatgacccagttgcggattcatgggatctggaaatgccgttggtattcgaagaagtcatgaagtgttacgaaatcgcataagggtattattatgaatagcggaaaattacaaatgaaagttagcgaagaagaagttaaagagcggttatcggtagcaagaagattccttgaatctatcgaccctgataaacttggaaaatgccctgatacgatttgccttaattgtgggcgttctgttcttgttggtaagtgttgcgataatccaaatatagttgtgatggaaaaggaacaagtatcccccgaaacatgggatcagatccaggaaatcattaaaaaccctccagcgccaactaagaaattacgtgaattgatgacaaggaaaatgaaatatgagcaaatttaaattgagtgcaaccgttcgccttattcgttggaatggtgaagagatccgttatgatgaccctgaattcgcccatgaaattctttcgcatcgtttgggattgaaaaacgcgtcattggttcaaactgttaaaacatcagcagagccggaaatttggcgttgtgttattctggatctcgataacaacattgattatgatgatcctaagaactatccgcttctggaagcacaagttgagaatgctccagaagacagacagtgttttttggttgagttgccacgcgaacattacgaaaacatcataaaggcccgtaaaaaggtcaataacaatgttttcgatctccacctcggattgtttgaggattaagtactgctagttgtgttcgtagtagcggcgctggtaggttcccccacctgtatacattcaagtgtttgcaggtggaaatcttttgatacgtctcgaacacattcaacgatcagatattttcctgcatactcttccccaaatacctcaatgattgcccctaccttaacatctaaacgaccctgctttatatcgaatcggatccggcgttcatagctggataacaattgcattttagacgcctggaaaggtttaccttctgaatctgggttctgaaagttggtatcatagattgcattacggtttgtgaagatccatgtattctctgtgtctgtatcagccagtatatcaccgtacatctttttatcagtcaatgacagactaaagaaactggcgtctttaaacagcgttgtgttatccttatgggtaatgtactgggcttctgtgaatatgacagtatcgccaacaaacacgttatcaacgttaaatttgtatgctgggatcggtgtctgggccagaatgtcagttgaacttttaaggaaaataccggaaccatcttcccacagataacagaaatcagaagaaactacactttgcccgttgtccctgatataatcgaatatatcctgatatgtaccatttagacatccaggagggatacgtatgttaccgccgtcaacttcgggggtaagtagtttcattttgctatacagtgccgtcatacactctgtaatcgtctgtacggcgttgttactaaatgaacgggcaaacttacgtctgaacgttttatgcagcggagagaggttcatacgcagcacagagcggtttttatcgtcagtatctacgttagagtaaagcaatccgtaataatgttgttcctgtgtaccgttatactggaaagatacctgtatgatcggctggataagttgctgatagattaactgtgcgtcgtatatctgcatcagcgtttccgatgagccgttaatcatcgtcttttcactaaacgagacaagagcgggtagcaattcagtatatgcgttatcaatatatttttcgtatgatgtatataatttaatcgatgtgactcgattgacgattttttcagccataaaaatccctcctaatatatcctatttactaaatagtaaataatgacccaggttcaatttgaggcaataatgaaaaataaaactcttgataaatttatgactacacggcttgaaatcaagaagactaacgttaaaaccgttcatcttccggatggaacagccattgagatccctaagatgtcgtatcgtcattttgtaaagattaagactctgaaagatgacccagttgcgatcatgcgattcatcattgatgacatcaaaccgcgtgaactaacagcagcggaaattgaatttgtgttgatccatatgtatgcacacaataacgctgattatgccaatacgcttaaagaaattgggctaaatcttgatgacctcaaaatctccgaaccttgctatgattttacgtttgacaatgtgcggttagtctttgacaaacccagcctgttaaatgctcaccttccgttcctcatcaaagaggcatatgttgacggtaagccagtagaattaactgaggataaacgagacgaattaattaattgcctgtaccgattcgaatatgatcaggtatcgcgtggtgtcctccaagaagtatacattattcatgaggggaaaaccatcaaagggcttaacatcattggtgaatgataatggctaactcttatttcaacgaagaacaaaagaaaaagtttctgaacagaaacagcaacaaacaaccagcggtcaccaaagtaacagcctcccttgatgctgaaagcgcccgtgacctaaaggaaatcaacgataacacccttgaaagtgcaatcaatactcttgatatcaaagaagggttgaaatcgttcgaagaaaaattccgtgacaaattcgcggggttcaaagaacaatacgaagaggataaaaaggaatcattagccgaacaactacctgatttcgtcggcccgatccgtcctatatccttaaccgatgataactcaaaaactgttgacaatacagtaaacgttaaccaaaatggtcagttcggtaaactggaagaaaacaccgaatctatttttcatgctattaacaaacttgttgatttatatgaaaatactgataagcataagccgcttcctgaaccagtggaagaacctgatccgtatgtagacactaagaaaaaacgcatcaatgatgatgatgacaaaagaagcaaaactctggatagtattgctaaaagtctggtttctattaaaggttttacatcgcagatccttagccgtttcattggttactctctggaagcaatggcaaagtttgctaaatggacgctccttattggttcgttaatctttacattcgatgtgttgcgagtcacaatacgcaaatggttcgaagatatcctgaaagaaggggaatcctcaaaaaaactatttggtacatatctgggtaacgtaaaggctatcgtaacaaagatcgaagaaggtttgaacaacttcaatatgaacaacttaggcgaatcacttcgtgatttgttcgttgagcctatgaagttgttggggcaaactgtacaaacggcaatcactgagggtatcggtcgtcttattcaatcattgggtgaatcaactggcatagacagcattaccaatgccggacgcggaatgcagatcaccgctttacgtgataaacagaaatttggtcttgaattgactaaagaagatattcttatgatcaagaaacaggaactagaagaccaaaaagcggcattagaaaaagaagataaagctattgcagcacgtcatgcattaacaataactccttctcaaattcctaatggttctatctataaagttgctcctactgattatcaagaaagaaatcagaaaaccgtagatgctgataaagaacggcttgataatatgaagaaagcaacggaagaaatgcagaaacaatacgatttagctaaaagcagcgaagaggaagcacaaaaattagccgatgaggaaaacaaacgcaaccgcgcacgtatagaagaagcaaaaaggttagaacaagcgaggaaggaaggaaaacagccgccagaaggtgaagagaaaaagggtgatgatctgttgggtaaagcaaccaactatgctaactctgaaaatctggatgcagccgatatcaaatacattaacgatgaactgttggatcagcttgaaaaacgtcgtaatgaaggcaatctggacgatgtacagaaggatagaatctctgaccttatcgagcaattgcaaaacaagattgcagcccgtacagaatccagcgccccgatcgacgcacagccaccgttagcagcaaataaaccggatgctgataaagcaagcaacattcaggttaacaacaaaactgttaacaacaacgtaactcattcagtacaacgcacagagcataaaccgctcgtagcgctggcataaggaacatataatgaagttttctattattgatgacagtataaacactctcaaaaatattaaaaatcgcggtatcccctctgggggtgccgcaatcacagaatcagtattaaagcaaactatcgttaccgccgaatttccggcccaacgtgcagcaggtatcgataacgcttataatgcttcgagtctgtataataacggccttctgttcactgcatatgattttaatggtgttggtagtaaagacaactatcgttcattacgtcaggcagcacagaacccaaaacaaatactatcatctgcgactggtaatgttaagtacaaacaagtgttgaatagttctattggtactatggaacctgtttgccagatcctgctaccgcgaagcctgaacgataacgaagtaaacagccaccgctatcaagatgcaaacgatagtttcttaaccaaagggttgagccgtgttgtttcaaacatggtatggggcgctgtagaatccgtttcaggcggtattatggcagaccgaagagaagcccttgatgttggtactaaagccgctttccagggttctgacaagcgaacaaagatgtattacaatacattcgtgatcgaaagccgtaatgatttgctggaactgattaaaatctactatctgtttactgttctgggatatggtacaacttctggcggtactgctaaagaggttgctgcattggttaaacagtattacggtgttctgggtgctaaaaccgctaacgcaattagcccttccagtaacccagtaacagcgtcagattttgataatagtctgggtaatgacgtggttgatttcatttcaaacgtagaggttattaaatcgcctcctgtctggtttattcgtgatttccagtctggggattccttgcgtttacctcattcaacctttgggccagcaggtattaccagtgttcgctttggtcgttctattgataatattgtaaatacattaagagaatcaccaaataccccgatctcacttgaggtcgaaattcaatttatggaactgatcgatatgcgtcaggattctatttttgatacaaattactaaggagatatgatgttttacaacgtagatgaatttttatcaggtatggctaatcgcgattttcagcgtagcaacctgtttagcgttgtatttgcaaccagccctgcatcacgtatccttgacaacacgatcggtagtattcgagatactttgattgatggatctattagttctatcaacgcaaacaacccgaacgaattcattaatgctatcactggcggtgtgagtaaattgtttagttacaccgtcgataaggcgattatgtcgctgaacaaaacaggatttagcaaaatcatcggggcaattagcccccgtttgattacttccctgtttggtgatagcatgtatggacaactgctatctgaattccgtgatgaaatgatgtataatatgggtttaagcattatgggagttaacctccctggtaaatccattgggtacgaatacgtttataatggtggcgtacctcaaatcagattcactcgccctgagaatggggaattgtcgctgacgttccgcaccgattcagaagcccgtaacctgaaaatctttaacgaatggatttccgctattcgcgatgatgtaacaggacaatacgccttcattgatgaggtgacaagtactattcaggttaacttacacgatcgtgatggttcaccgcatacaacatacgtatttcagaagtgcttgcccgtcaaaatcagtaacagtgaattgagctatgagaacaacaacgaaatctggacatttactgttgattttgcctataaaacatcatgggttgtcgaggctgataaagaaggctgggaagggttcaaacaatccgtagaggaaggtttagccattgcagcacgtaccgcaattacaggacaataaaggggctacggccccttttgaggatcttatgtttgatattattcgagtaacattaccatcagggatcaaacgattccctatgtttacagttaaagaccagtttaaattaatgctgacccgtattgatatggaaggtcggccccttaaagagcaacaggaaatactggatgaagtgttggatctgctttaccctgggtattccaaaacagaacaggaatacattttcagccgggtgtattgtggttcgttcggtaaaaacgttatcaaggttgtgataggtggtaaaggtgggggccactccgaagccttcatggtgattaatgatattcaactggaaaacgaatacaagctgaatgatgaaatcacattagggtttaacttcccccgtacacgcaatacaagcgaagagttgtttcttgaatgtatcagttatgtaatatacaacgaacagcgctatgaatggacatcactaaccgaagaaacgaaagagaatattcttgatatagtcgaacttgatgatgtcgaaaaaatagttactatgctaacgaaatcggttgatgtgtctatgcgcggtaaatcatttagtggtatgttaaccctgttcaagatcctgtttagtcgcggggatctggatgaatttgtgaagaccaactatctgctaaataaaaacggcctgaacctggaacctatcatgaatagtagcccaatggaaaggcaaatttatactgcattgcttgcagaagacttgaaaaaacaaggtgctgttaaatgagaaagcatgaatataaacacgttgagaaatataatgttgattatcgtcctctgacacatacagagtttacccccaatgcagattttatcaaaggggatgtttacctgtatcaaagagaatatcttttcattctggcacttatggaaagtaaaaatattgatacccgtcaactgttcatcaactgtgaagaatgtcaggaaagaattgaattccagcttaaacgcaatcaaataatggttgaagatttcgacgataagctatacggcaatgacgggatcgcgttatctgttcaccctcgtaagactggtgatgaagaaatccccgatcttatcgattacgtaatgatagacggcgaacagatcatgtggagtgattgcagcgacaaagataaagaaatggtgttggatgcaatcgactatgcaacctataaatcgatttctaccgccctggataagccagcagtggtcgcaaacattccggtaaggtgttcgtatggacatagccatatcgtctctctgagaggcttacagcaatttttaaaggtggtctaaatgggtgtaaatctgaggttgctatatagcgatatagaacctaacatgcaacgagattggaataatgacgtagcggcctcaaaaggggccgcagcagtgagaaatagtttgattggtatcgtaaccacgatcaagggtacacgtccatttgatagtaactttggttgtgctattagtgatatgctgtttgagaacatgaaccctctgacagcggaatcaattagaacttctatcgtatctgcgatccggacatatgagcctagagtatataatctttctgttgaagttattccacagtatgatgataactcagtaacagtaaccatctattacagcatcattgatgacccggatgacgtagagcaaatcaaactacagctttccgcatcataacaaaaagccccttcctttcggtttggggctttctcttagaattcaatgaatcccattagtgtttgatatcgcaattcaaacggggagatataactttgcatctggttttgatcggatacgatgtaataatacacctcatcattatcatcgtatagtgcttctttgatgatgcaatatcgatcggtttccacgttcacataaagagtatccatgtactttgtaactttggaaccctgtgaactgatctcgtgaatagcgttatctatgaacagtgacaatgcttgcatgaagttatcaaactcaccatattcacagcccataatagaaattgcagtgtattggtgccagcctttgattgtatctccacggcggatccatccgatttgtctacccccgatagatacacaccacactttaccaatagggctatagaaccgcacaacttcttttaataacagggacatgaccccgcattttgtataaggattcattttaacctcatttcatatcaagtagccatgaagggctagtttcaagagaaatcgcagtatattcgtattttacagtataacctttgaaaccgaaaggaataattgcattttcattgagatattttactttatgctttgcttcttcttcattcagagcagcacagactgttgtttgttcaacgttaccagcaggagaagtaaatttttcaatgatgatatatacgcagttcatcctattgtcctctttccattttttcaagtttcatcgtatccacttgcagttgaagtttaagaatacaacctttcgatatgttatacaagtagtcactaacgatttttgactttacctgatcgtaatcagaagataacgtaatccaatcatacatcgtttggtatgatggaagatacgtacattgttcttcttttgataacgctttaaatgattggtaatcggttggaggttccgaagcaattgcggttgtggtcataagactaagtgcaagtagtagatatttcataatgtattcctcattgttttcgatagaaccaatatagcaaaaagccccgaccgaagtcaagggctttttcatcaatgcaagaaagatttcacgtactgttcgatcttttcacgacatgtatcaactgaggtgctttccgcaattacggcatgacataacgcctcgcctccgacccagaaactcatcatgtactgaatatcacgaccttccatttctttttgatgcgctttgattcgatcgaaagcgttttcgattgtttcagtagcagtaagcatttcggattccccgtcaacctccgccagttccccatcgatcatttcgctttcgacttcttcccagtatactatcgttatcatgcattacccagtggttaaccgtcgtaatccccgccacaattcacatcgccttcaatgaacagttcgcggttatcacgtaataaattatactttctttcgagttcaggcccgaacgcgtcggcgtcttcataccagctataattgtatcttccgcattcatcatcatattctggttcatcgccgcgttcattgaagtgaacaattttgatatcgtccatccccagttctttcagcttatcccagatatacgaaatctcaacgctatgggaaccgaacgcttccagtgagatcgtaccgtcgctatcgacttgaggaacaccccacttcgaacgagtatcatcggtgatcatatctattaatgactcaatattattctcaccgtagatatcagcaacttccttttctttaccagggcgaacaagtccgatcccgataataaagctactgcttgagctattgctcacaaacccagaacgaattttcatcgcatcaccatattaccaatcatgaatagagggattaacgcgaagacaataccccatagaatgaccttatcttcacgacggtcgcacccatgatagataacacctccagcgaaaatcaatacaacaactgaaacgaacgcgaataaagaaatcatttgcgggtatccattctcatagaaacttctttcaggatcttattcagatcgtgaagcgcatcttttacgttaccttcattataggtaagaatatcctggtacagccctttcaagcaacgattgataacatatgctttttcggaaggtaacattgtcccagaacgattataatctctgaaaatgtccatcatcgtgccgttgttgccaggtaatgacgggttgaagttaaccataccggacatcaaactatcaacatacacaacggttgtgttatcagaacgatacgcgccaccaactttaaaccagttgctgaacacatacggagattcccgcacttcgctcaaatcggttccgatttcatcgatgtttacacgaatgttgttaaaatacaccgattcatcaatagaaccatgacgccataagatagcaccattgttatttttgaatccgactacatcaacctgccagccgttatctgttaaccggacatcatcaacgacgatgaaatcaggtagctgtgaatgaaagccgatgttttcaggacgggaattacgaaacccatcacgattggagaaataaaggatgtcgccttgattcagttcgcatatattcataagatttttaaagtccaattcaagtaattccacaagtcacctcaaagccccctttcgggggcgagatctcattagagtttaacttctttttcttccagaacgattgtgcaatcaaatttcacatctttccagaattccgctgcaacgatatctgttgcggtaacgcttacgctggtttcttcgaaatccagatccgcaaaccatgcgtgtccgacgacaataccgtacattacacgactcaggcgattattaagggcgcgaacctctttaatagtttcctttgtctgcttatcaagatactcgatcaggtcattcttgtcaagcgcttcgatctctttagatacggtatcgtaagcccacagaatgatcaggtcgccattgttgagtttcttcttaccttcggcgcgttttgcaacggtagccgcaacagccggaagtgatgaaacgcctttgattttcacgttcagttctttcgacatgtaaacatcagtcgattctgtgcgctcaaccttcggagagaagccgtaatcacggatcccttgctcagacaaccattcaccagccgcctcaccaaagcgctgtttaagcccttctgcgttgcgtaaaccaatcgcgttatcacggaagaacttcattaccttctgacggcctttcaggatttccagacggacgttatcagcaacaaattccttaccagaaataccgcgagtcatcgaacggttaaccagaggcagagaggtaaagtcaaccagtacagacatacggtcttcaccaattttagccagcggtttgatagtcagaccagaagcacgtaagtttttcagagtcggaatatcggtttccagcggcagtactttaacgttcacgataccatctttaacaatggtaaagttacgcacttgtttggtttctactttttccggtaatccaaactctttttgtttgctttccggaatggttacgtaaccttgtagatccgtattgatagaaatgttcggacgggaactgttacccaccaggtgtttcactgcaactttcgttgtggtttgggtaaattccggtttccatacttcatgcgctaccagttgcgccgccagtgctttacgttcttccggagtagaagcgtttgcaatctgttctgacagtttatccagtgtatcatcatctttctggacagtctgacggcctgtacgattgtacgcccagtgttcagaagacaggtcgatcactgtgtcggtttctgccagcagttcgagagcatcaaccagagtaaacgcgttttcatcaggaaccatgttgtaatcaacaccatccatcagacgtttagccggatcaacaaccgcttctgagatcatatctttagcgttggaataatcctgtttggtaaagcagttatcgtatgctttaatcagacgcacatcaccaagctttttcagaactttccatgccagatctggattcatggtatgaagcgcatgatacagaaccacatacagaacctgttcaccttctgctgttgccggatcgaagccgtcaacgtcattgatcgcgttttcacccagcgcccaaatatttttgatatgttccggaaccagaacaacaccatttgcagcattcaggacatacacacggccttcatccaggtagattgcatgggttgcatcgccaactttgacttcaacacgtgcggaggtttgcgcggtaatgatttcatcaaatgcaggtacatacgcatcaaacccttcaacgaatttgtgtaatgcgttggttgcttccgccattttttccagcagaggacggtttacataataaccatattccaggaaagcaatgttgttaaacgtcaacggcagagtagaacacgctttcaggatgtcatcagtacgccagcagttatcataaccatcagtcaggaagatcagactgttcagattgccattatccgcttgcagatcggtagcgacttcaaccgccagttgcagaggttcaacgaagccagtacatccggtcggacgcagataacgatcgatagcatcattgattttgctcaggtcggatacagagctaaccttttcgcccacgaatacagaaccgaactgaccacggctggagaaatacagaatagatacggtatcatcctgcttaaccagcgttgccaggttgtttttcaggtgctgacgaatgcgcgggagttcgttatacatcgatccggatacgtcacaaacaaaaacgtggttagtcggggttggtttggctacggcgtttttgaattcaatgttagtgatcataattttctcatttataggtaaattttattaaaatttcgtttacttttttgctaatagtatctaatgcatcatcgcatccaaacttactactcaacaatgaaacaaaatcatccatcgttgttgtttgagactcaccaacgtcaaaagacagagcgtaggcaacaggatttttaatccttacgatttgaatagtatactcattcagatcaaaccgttcaagatattttcgcaaagaaaataaatcaatcggtactggtagagtttgactaaacgttatttcttcccccagttgataggggggcatttttacacagatttcgtattccatcagtggtgactcttcatagtgtgttccagattacggaaaatttgcccgtgttcaagctgggattgaaattctccgcattcatcagagtaagtaaattcataaatgaatacaccgttctgattgccaaatttagcgttgtactcttcatacagccacatcttgatcagagcgtctttctcttctgtttccagatcataccagtcacgcccatcataagcaagcgcaatttgaggattagaccgatatcgagtttcggcgctatcttcggtttcccattcataacgcttatcatcatagtatgattcgaagctatttcccatatgaccgcccaggtcgcggtgtacctgctgtacaacttcttccgctgtcgggcaagtcatccagctataaccacagttaggaacacaatcacccatcatttcccggagattgttgatatcagtcggatccttcgggaaccgtacaataaagctacttgatgaactattgctcacaaaaccagaacggattttcatttgatttcctcaaattcaaaagcggtgaaatgttttctttcgtcatacccaacagtacaacgatgcgtttgctttcctgtgaatccatcaaacacagttacacaataataatgcaacgatggaagcggcgtatgcttaatgtacttgatcgcgacgttcaggtcaacggttgagcatacacaatcacacgtttgctcaaaacggtcatcaaaaatcaactcaatgctatagattttcatctttcacttccttcatgtttttcataaattcttcaaaagttacggggatctcgttatactgttgtgattcttcatcccatacatcgcgatgcccgaatgtcgaactttttgcaatgagtttttcattttcccatacatcaatagtaacatgatcgccaagataagggaaattaggaactttgttcagcgcatcaacacagttttgcaatgattcagaaacatgaacaatttcagtgaattcataatcagcactataagaagctacgtaaatcatcaccaccccctaacgatgctaatcaacagtaaacccaggatccagaacacagcaaccgcacaaatacgggccattactacatttccgcgactagtccactccgcactaagaaacaagagaacaaacgttaacgcgtataaaaccatttcaataacttcggtaatcatataaacctcactgaatataacggttgtagttgatgtgccacatgagactagacacagcatcggaaacaatcaaaaggaacaaaccagcaatcattatcaaaaggataactaaccaagtggttccgatattttgttttaacgacaatagcaaacacataatactgacaaaagcaaggaaagaaataacaagcatcgcgattgaaggggccataatataaacctcacgaaaaagccccaaaaggggcttgattaatcaatgtccgaacacaccacgaatagactctgcgaatgcatacagttcaggatttttagcttttactgtttcgatttgctccagaatgtaatctggcttgtatttcgcaccgaaccagcagtaagagaaagagcgatcccacatgaacacgttatagtattcaccgttacgaacttcaaccatcacataaccaggattagaacccagcggataatctttcagaagattgaatttcgcgccagcaccagtacatccgttaaacaggtcattaaaagtcatggtatgttccttttgtcagtttcgtttcaacaaggtcactatactattcttcgttagcctatgcaagatttaatttagcaaattcaccaaaatgttttatcgcttcccgatcgtatgcttttgcagcctctaattcatcactataagaaccgatatgcttaaccttaccatcaaccattatctgtgcaatgtaacgtactccggttggttgattgcgtacacatacgcccttgaacacactggttccttcctttcgtcgtttcctattctgagagttgcgggattgattcgcttcacgcaagttatcaatcccatcaccagcctcaacaccatttttgtgatcgatcacatccggcagttttccggtcgcaacgtagtagatgattcgatgacgtagataccctttgcttttgaaataaacacgggtataccctccttttatcttcgaaccaacttcctttccgatcaagtcggaacgtttatgcgatgttcgtataatcgtccctgtgtggacatcaacagaaacggttttgaggaattcatcaattcctctctgttcttcttcaatcgttcttaatccattatgtgacataatgccttcttaatttgttttgctatggcttcaattactgggatggaaactgaattcccagcctgtttgtaagcctgtattttgctttctgggatagtaaacgaatcagggaacccttgtaacctaaaacattctcgcgggcttaatcttctaggattcttaccttcctgcaataccagacattgaacaccatcctttccatattgggctgttatcgtcccagtacacacagaatcaactgtaacggcctgatagccaaaccccttgccgtttgccttgtttcgttctttacgctctctaaagcccttccaggcacgatctgatatggtgtattgatcattatccggttcgagaatgtcaccgacccttgttggggtacgtggaggaactggaaaactaaagaacaccggatcgcgaaagcagacaataaaaacacgctctcttcgttgaggcaatccaaaatcttttgtattcattacctgataatgaatatcgtatccttcgtcctgtaacagcctgtagatggttttaaacgtgtttcccttgtcatgtgttaatagctggggaacattctcaaagaacagcacagagggctttttagcccgtataatgcggagtatttcaaagatgatagtaccgcgaggatctaacatgccctgttttaaccctgctttactgaacgcctgacaaggaaaccccgccaacaggatatcgtgatcgggtacatcgttttcatcaatggtgaatatatcaccctgaatattttcatcaccccagttatcagcatatgtttgttgtgcatgtttatcgatttcagacgttaaaaggcattcgaccccgccgaatgccttatcgaaaccgagcctcacgccaccaacaccagcgcaaaggtcaattattttcatacgtcgaaatcaacctcatcgattttgtatgattcttcgccaatatcagcccatagctgaatattcacactttttgcatcacgataaagagattgaccacaaagcccacctgtataacaagtttctgtaatctcgttaacttccaggcggaggctattgcgcataattttaacaacagccttttccattgccgaatctagggttttagtatcacccaatactacatctttaacgttcaaaataacatcactcattagcgccactccgtttcaattccgtgtttataagcgtcaatccccagtggggtaatcactaaacacatatcagtatttttcgttggtgaactaaacgccatagatgcgtagcctttttgaatcagggcatcacgccctgatttactgggtacatcgttgaaatctaaatccaacattttcgacgagtatccgtaaagtttacacagaacatcaatttcagcgccggacaatttcggatatgtcatttgtagtacctcacaacatgttcagaatacacacgttcaatgaaatcattccagaaatcgcgatcaacttctttcggataaccagatacagccgccagcttttcaacttcacacatcgttgattctagcgcctcttgtacggttgcgaaaggaacaccgccagctttaaccattttcaaaaatgcgctatccggaagaggatacacaatatcaccttctttgaaaatctggatcaactgcataccaccgcgcaacgcatgagaaagagctttccagtcgatcccgttgttggcttctgcttgccgtgctcgttccccgtattcatcccagagtttatacacggattttttcatttccgctacggtgatcgtagactggaatttacgccccagaacttcataaaattcctgacaacctgatttcagtgttttgtctgtaacgaatcgacaaaactcgttggtcgggaatcggttagaaatctcaccaactttgatgcgcttgccgtagttagattcatctacgttacccagcaatgatgtgccataccagtaatcaggaatcatcagtaacacatcgacaacttcacgtaatgcagccaggcgagaacctttaacgccatacttcgccgcttgcttacgaacataaccaaacaggccagttagttccgtagtgtagaagcgtgaacggttagcgcggagatattgccagatatcagagttagcgatcagtttgctatcatctgcatgaagcatatcaatcgccacggtgtcaccatcacatgcgaggctgataaacttttgcagactgtaaatctgacggtctacgtcattaacaccgttctttgagtttttatcgccagttgatgtatcgatagacttcttcgcagtgcctaacaggatttcgcgaggatgagggagatagatccctttgtagtctttatcgcttgttggtgtttccagtccgtaaagatgggatccaaaaatcatttcagtaatcattttcattatacaaatctccaataaaaccctttatgagtttttcttttaccgttacagcatgaacttacatgccctttgttataccccatttcaacggcttccacaataccaccatttaaaatagtttctctttctgttttgatacatttcataatcaaaggttttatcaattccgtcttcttttgtgaaatattagctaatgcaattacatttctgatatcagattcactcattacatcagaaaccttctttctcatccatacatagccttgacttttggcaagtttaccggaacaacattcatgaatatgactagggttaaatccacgcaatttcatttcttgctgaccacctaatataataatcttgtctcctgtttcaaggttgaacccgacaaccggaattatttgcctttccgacattttctttctcgcttctttcgtgaatgttgtaagagattttaattttctcgcgtcactcatttgtgaagatgtcgttttgtatttcttagtattatgagacatacggaaaaaagcatatctcattttatcaccagcatacttagcaagtagatgatgagcaagataatgttctttatatgtcaaatatactaaattttcgggttcatctgtgccacctaatgacttagcaacgatatggtgtatatcataaccgtgctttctatactttttcgagtaacctttaggtatatctcttctttttgccagtgtaattagttggtcgtaaatacgcttatagttcatacattctcctttatgcgtatttatcactcaaaatccgaatatggtttccatgatcatttacgtctccaacaattagttttttcacagtaatgaacggaaacaggcacacccaacgtttctttactgcttctgttgtatgttatcacaacgaatcggttttcgccacccctaacacactccagatccaaaatctcgcgggttcccttagtgttcatgtctgcaacatagtattcttcgttgttgacaatcactatatccgacataatcaagcgaggtttcatgcagcatacacctctgattcatcaagccattccagattctgattgagtgattcaatcagctttttatcgcgtctggaaataacaacggtagaacctttttctgccttcgcgatgatatcaccagaagaagtgatgtattcaacctcataatcacggcgagggcttccgagtttatcaccagggactacattccgtttaacagattcatgggatttttcggtgaacactaattcatcacctacgtgggtaacaataccatcaacagcagaacgagaattaacataaattttgctaatctccgccatgaaaacactatctctcagatatcgagcagccactttatctaaacactgagaagatactttatctccgccaggatataccgagataatcattacatgaccctgaacacgggcggttcctactttatgcagaatgtaaaccgttgaaccatcagaatctttagatatcaagatcacactgaatgattctttcttttccttccgagtttcaccacaggtaaaactcacatccagaaaatcaccaactttaacagcacggggttttgctacttgttcacgagcactaataacagggatcataatcacctcacagtttcaaattcttcatcagatttccagtacacgttaaaattacgacaatcatgatcggatgtcaacgtgtatttttcatttgttttttcgtcagtgataaccatagtttcattctcgatcgagttaacaccgtaaacgaaaacattctcaccacgtttgtttaaaaacgcatcacccttttcaatcaactgccaacaggtaacaggcaaaccacccggactaaccgggcgggtaacaagacaatagggatgtttaatcatttaaattcttccattgcataggaagtaagatctttgaaataccttgcggtgttgccttctgggttgtttgtaatctccatcaggataacagcactatcaactcctgctttcttagccatgaatgaaagggcttcggtagcaataatcgttgctttcataacatcagctttagaaacgttgattgtattcatttttcttccttttcattaatcacttggtatgtgtgtataatacaaaagccctcacgagaacgcaagggctttttattaaatttcgtataaatctggattcacaataaccgcacataaaagatcatctatatgtgcggcttcttgttctaaggtttgcttagatgaatgtgctttcaagcaacccccgtaaaggcgtttactatctggaaatgatcatcaaagaattccccttgtcgttgcacgacctcatgcataggtagccagaacgcgtctgctgcatcatcagcaccgcccatgatacgaggcaatgaaccatcgttattaggttcgagcttgatatactgtgctacagtcggttttgagaagtacaccgaacgtttcggatgatcgaacagcatcgaattacggatagaaccacgaataaccttttcaggtactttaattcgtacttcttccagcaattcacggatcgcgcaatcaaggaacgtttcattaccgtttttgtgtccacccggaagcgccaacgcatctttaccaggcgcaaacttacgacgaattactaacacgttgttattacatacgaccactgaatcagccgtgcaacagttcagagaatccggatacggatattttttgaacttgtcaatctctcgttgccagtgtgtatcttcatgggacaaacgttggaattcttttgtttgtgtccattcatcgataaaggaaaccgtagtgctaggcgcatattttaacaaatcttcgtcccagccttcatggtgttcccagataattttgcgtaaattggtcgaggacagatcctgatctccaaccttcacaggttcaaccggaatatgattccatccgaatgctttaagccagtaagaatctttgtctttttcgtacccgacgatcgcaattcgatcatttcgagtttcatcgattgccatacgaacacgggatttccatttttcctcgttatagaggtaatccggaatgtgagcgaatttgattctggctgcatcttcaacatcaagtttgcagatagaccagcgagtgatcattgcttgacgctgtttagcggtcaatgggtttaatgtgttcggatatgcataagcagaaccgatcagaatgtaaaccgtatcagcaacagcaagggcttcccttaccattttctcatgaccatagtgaaaaggttgaaaacgtccaattactacagctttatcatatttgtgtttcataacgtgctccacgtttaaaggttaatcataaaacagacgcaattatcaacacaccaaacaatccaccaacgaaaccaaagaatagtgaaatgagtatagtcagtacgatctgttttatgttcattatagtattctcgttttagatgtcaagcccccaaagagggggctttaaaacattatttacgagaatcgaaaatcactttacccgcataatccgaacccattacagtttgaggtacgccacctttatagcgggtagagtagttcatctgtacatccagttctttccagcggatcatttccggtgtaatggtgcgttgcagggcggcgttggcttctgcttctttcttcgctgcatacagacgggcatcagcatcacgttcgttagcgattgcagcgttttcacgcgcctggcgatcggcttccgcttgttttactgcttgtaatgaagtctgttctactttttgcagttcagctttagcagcgttaacctgttcttcgcggatcttcgtgttagttacctgttccatgataacttccggcagggtgatatcctgcaagaatacctgtttcacagtgtaaccgtaaggccgtgcataatcttctacttcctgctgaatcgcaatttgcagttggttttggatcttcgcatcaaacaggtcttgcgcttttggtacggatttaccaaattcgcgaacagtggaaagcagtttttcggttacatacttatccagtgcctgatcctgattacccgcgttgatacggttgatcggtgctttgctaccgtcgaattgcagcattacggtcatatccacagtggatttaaatttatcctgggacggaacctgtaatttgtcgaacttcatcgcgatgtctttggtgctgaacgtatcaaacgttgccagcgggtttacaatgtggaaaccgggcagtacgggtttcggtgatactttacccatgaaggtttcagttttaaccgtaccgtcttgcacaatggtatacatgttaggcactaaccacagtgctgcaactacgcccagagcgatcagagaggttttcttcgggttgttcacgatagtgtttaagttcatcataatttccataagttgttgttcaattcgatagttattctatcatcacatttcacgctgtcaaactatttttaagaaagttttgtcagcttgtagattgtttgatagcacaagcccttaatctcgtccaggatgttcttcaaagaactatctactgattcgtagatctcgtttgcttcgttggctattttacggagatacgctaccgtgtcaagcatattttcggtttttagcacaggtttgtatcttcccgtgattcctatgtggatttcggtgaatttatcaaccaaatcctgcatatcttcgtaaaaaccctcatatgctttatgttgtgagtaggaacctgttgcaaaatgtgcgctgtgcatataggttacagacattaagcaagtgccaataaaggcatctatcttgcttgagttctcagattctgtaatttgtttaaatgattgcatgatgatccctttatgaacgatggatacttgcaaactcatacgcgaccctaattcctagctttgcgcattcggattcagatcggcattgtttttggtgccattttcgttccatgtagttgtagaatagttcgcttgtatttacgctgggagggatcgttgtgatgtatacttgaagggccgcattgatataatcgtcaaattctttctgaaccggacggtcggcggcgtgtgttgtgggtgtcatcatcaacaatccgaacagcacagccattgatatgcgtttaatgttcataacaattactcttttactcatagacccactataggtctactcctgtatatatttatagcaaaaacgaggccgaagcctcgttataatatttttgctgtaaagtcaatcaagtaatgtcataccaacacaaacttctttcgaaagcgcgtattttgttcacgttttctacgttttcatcccaaccgatcacaccagctttcatacgtttcagttcctgacgtaaacgggtacgtacttttgaatcaattttctttactgcaatagaaagcattgcattcagatcgccatgagctttgttaccgtcgcgacacagattattatcaaatcgaatgtatgcacatcctgatttgtgtttccagttggttgagtaccaacgcaacccatccggatcaatgccatgttgagcataataacgagaatactcttttacttcttcgatcttttcgttagatgaaaggtcacgaagaggattgtatttcttacggtaagtgcgactcataatgatctccttttgtttatgcttccactgtatcagggttgttctttagttgcaagtaatgttttcgacaaagtgaaacatatttgtcttcggccccgatctcaatctggtcgccattagcaacaaattttccatttgcatcaatacgggcaacggtagttgctttctttccacaatgacaaactccccgcaactccctgatctcatcagcaagtgccagcaacatataagaaccttcgaacaagttcaactgaaaatcggttcttagtccatatgtcattacgggtatatctaattcgtcaacaacccgacacagatccatgacatttttcctggaaaggaattgcgcttcatccacaaacacacaagaaactagtttctggctgtcgctataaaaatgattgttgtgaacatcataatataagtccatatcaggtgtgatcatggtacatgttgcttccaacccaatacgtgaagagatactctgtttaccttctcgcgtatcaattgctggtttgtacatcaggatccgcataccgcgttcctggtagttgtatgcatcagtgagtaaacgagcactcttgccagcattcattgatgcataatgaaaatatagtttagccatttatcctctcaacaaaatctggggtattttggaatttcccttccccttcatggtttttgcatgttttatttgaacagtagatccaccaatcccactcatcataagggggtttggtaatgttcattacacaaattaaagggaaatgacaatcccgacagcgaacattttctataatgtttgcgttagccatgcgtataaccgcccatttcgctatcttgtgcttgatggatatcaagataccacatattgattttgcttttcagttcgcccatttctttatcaagcccactgtcaacaagacagagaatgtcaaccaccgttttacgctgggtgatgttgattttgttcgctttcatcgcttgcgccaatgcattacaggttttaaccagtgcggcgcgttgtcctttgattacggcgatccgtttgttcgctttcttaatctgccgccctgctttgataggatccatcatgattaattcaccttacgaggatcgaaatgaacgacaatgatcgggtaatcaccagtcacctcattaataatgcgcttaatgagttcccagtcgcccccagcgagtccagcaccgattaaaggtgtgatgataggctttccagtcttaacggcgtcagcaagccctacagcctgtttaaacgcattaccgattgcatcataatcgacacgcggcccaggtgtccagaaatcatattgagtatatgcattgaaaacaatgttgcctttttcgccaatgtaaacagaacaagttcctagcttatcacgggaaccttttaacgtattggcatcaacttgaaatgcaccaggaatacgatcgcggatttcgcgagcaataccagcgcccatattgcaatagcagttgcatccgtggatcaaatggccttcaccattcagatacatattgacagcattacctttcacttctttaatgatcatttttattattcctatataattcgcgttcgattagcatatcgatgaaatcagtaatatcatcaaaccaatccttagtttcttgagcatgagccaaatcaccatcatctaaaaacttttcgcgagcatcagcaaacttatctaactttttatagagttttgctttgtctatatcattcataaattaaccttaattattaaaagatcataagaaacaatacataatcacgcctttttacctttccgttcacggcggcgatcttcttgatgacacatatataaaacaccaccaaaaattataaaaccgataacaacgcctataaagtatccagcactaaacatagtcatcatccccgcaatagtaacaaggcccagtactctcatgtttaccagcattgtacgccaggaaaactacaaccgctgccataataataaaaatccagatagccattagtaaagtcctatgccagcattgaattcgtcaaccaaataagtacggaacttttcgcaccgttccttatttggcgcttgtttgcatagattcatcattggttcggactgcaaaaactctttttgtttcagcaacttaccgcgtttatacaggtgagcgttttcctctccccacatataagcaacatctaactgttctgcgatcacttgcttacatactgcgacatctttgatatcgcgattgttgcataactcatccaggcgagcatcaccagcgtgagcaaatccagcaaccagagttaaaagcagtgctaactttttcatgatgattccttattcatcctcttcgataggggtataataatgcgcattgcagatatacgcaagaacttttttcagagacatatcagagaatgtcggatcctgatttcgtctcatcccactaccagtttcaacagcccaacgtttgttagctggattgtatgtcagccagtagcaatcccattcagacagagtatgttcgaacagatcgaaacgcttacgcccatttgcttgcggccttacaaaaggttcaaccatttctaaagcggttaacactcgattaatgttcgaaccgtcttcatccatcgcgatccgcaaacagtattggttaatgtccggatccataccatcgatacccagaccgatagattcgaaaaattgtgtcgccgcgtgataagacacactagaagaacgatattccaacatcacggggatcttttccccatccttgacgttgttaatgatatcctgatcgataagttcaatcaggtctcttttctccttgttcaaggtagaaatttcttcttgcagcggggctatcttcgcatgaagttcttttatccgttgatcaattacggacacttcgaaagctaaatttctcattgcacccattccccgtttttgtcgatgtacatgatccaatcagcaaccgcccaatgggaagtattgcctttcggagtcgctacgatgtaggaaccagctttaaacagtacgcgtttagtttcgttcaggatcaggtcactcataatgtattcctctcaattagatgcatccataataaaaaagcccccgaccgaagtcaagggctttttgtcaaatgatttgtttttcttctaacagcttcgcggttgtattaaccatacgagcataatcacgggcttctttctttgtatacttgaaaccagcgttatagctcgccagcgcctttttcaagtcgcctttgtggtaatcaagccaatactccagttcatagatcgcatacttcgatccaccttgaagagtttcgagctttttgattactacgcgtttaggatatgacttatccattcgtgcgctggcgctccttgcggtaacttgccagcatccataagcgtgatggccttttttacctttaccgacattctcacatgcgcgagactcgatccaggcaatagccgctaaatgatagcctaaacgtttagccttatctttttctacaggttttgcagtcttcaaatcatagttgtgtccaactcgataagcatactccagaacctctttctgcttcggtgtgatgttctccagttccttgatataggatggagaatttttgtttgccggaggctttacagtagccttttgtaaaggcaattgatgagtaggcaaatccgcaatgaaatcccctagcggatccgtcgcagcgttgccagaaaaagagcacaagaaaatgctggcagcaattataattttcttcattttaatacctatgttgcaaaaagaggggcaataatacaccccactttatatttatgcaactattttatatagttttcgcgtcgcgtagtttatcggtgataaattcagcaatgttataatttgaaatagccttgttaggatcgtatagtgcaacgatttcatctattgataccataacggcatgtttaaagtagacgctccagctagtagtaaagatttctctgttgtcaaatccacaatcagggctgaacaaagcgcggtatttgtatccactgtatttcgtcagacgattcgtgctgtgcgcgtcactggtgatcagaaaagttccctggtgagtttccacaacgaaaaagtatccgaggcgttctttgttgtccagcatcttttcaaacttgcgatcggtttcttcgcgaacaatacgagaagtcagcatttccaacactttatcgtattcgggccaatcattctcgatcacgattgcatcaaatggtttcttaccattaatcccgcgcccgatttcgattttcgtgcaaatttcgttgaacgttttcaaatcttctggcgtcagttctttaagatcgctcaattttgctacataataacgtttttctagtttcattttacggaaacctcaattcaaaaatagtttcactgagttaccacatttaggacatatgataaattttttcacaacataatcagcagcagagaaaaatccattgtaaatcgcttctctcttttgctgtatatcagatagttcatattctaacccacttttacagcaactgcaaacagtaattagttttgggctatggatgacagtaatcatatacacctcacaaaaaagggggctttcgcccccatcattagaaattgtcttcgacaaacgccgcgagacgggaacgatacactgtatcaagaatgatatggcttgagtgttcgtattctttcagcttttcaacagcccatacaaacccgttgttaacggcagtgtttcgagggttgtcgatctgcttaatgttcccgcatagtatcagaagtgtgttctctccgcaacgagaaatgatagatttaatttcgtggttgctaaggttttgacattcatcaacaatcagcacagaacctttgcccggatccggatgtccgatactgcgaccacggaagtaatacaggctagggaattgcacaacccctttttcaatcaaaccttcaatgtatttttcagattccggattatccttaaacagaatattcaggctagtaatacaaggttcaatagaaggccggagtttttcgcccaatgtaccaggaaggaagccgatttcacttgataacgggctatctgacttcacatacatcaagttagcgtaatgtccactattaaccaggtgcatagcaccggaaacagcaagcattgttttaccagaaccagcgccgcccataatggtagcaacatcgatttcattgctcataattgattcaacgaaagccgcttgcagagaatcacggggttggatagctttcatgagtttgcgtttcatagcctgttcatgcttaacaggtaagacattcaagcaaatctcatcagcagtcaccacacgcccgactaactcaccatttgaggtaatgtactggttaggataaaaatcttcgtcaggaagcgaactgtaagtgatttgggctacattatccgtatatcccaacacttccacggtatcccaaaaatcagggatctctacataaccggaatacaatacatcgctatcttttaacgtatcgtcgccagtatactgttctaccttacacccacgggacattgcgatcagcaacatcataatatcgcgggtgatcagggttgcgttttcctgcatacaggtagcgataattcgcgcatcttgtttatcaagcgggaactcttctgaaccgatataatcaacgatacgtagtttcacgctttccggcagtgctgggttcgtcaggttcaacgaaacccctgtttgggtaattgcttcataattttgtcccaggattgctttggacaatagtcggatcgccagtctcgcttcatgagcggttcgctctttgcttttcaggtgatccagttcttccatcgttgcagcagtgataataatttcagtatcaggctcgatgaaagagtaaactgaatatgggttactaatcaaaacattggtgtctaatacaaagcgattagtcatgtataatcctattgtttgatataaaaattgccaaacaattctttggcttttgtctcgtacacttcactggctttttcgggcgactcgtaatttcccagattttttgttttcccttcgatcttaatagacgctctccattttttagagtgactatcaaaggatactccccgaaatcctgatttattacgactcattatctttttcatgctgttttgtgactgggtagcttcctgtaaattaccaataccatcaccacattccacaccatgtttgtggtctatgattaaaggcaaatatccattagccacatagaaaactacccgatgacgtttataataacgcccatccagtcggattgcggtatatccgtcagcattttttgttcctgcttcgcttccacacacaacccgacctcgatgaacgttccagtaacatctaccagattcgatatcaacagcaacgaactttaaaagatccttgattccatcaatttcctcgtttaaagttcgtttacctccaccatgacacttcattacgctaattccacatgcggggcatcaatgaattttgtttcgatcggaaggttcggatcatttttccagttgataccaaaacgcagtttaacacccagttcatcacctgcttgtttaacagcattcaggacaggcaaccacactttagggtttgtttgccagccttgaggcaacacgctaggatacagatccaccgcatcacccgtgatgtgttttgagttcattgtttgagatacacccttacggacattctcgcgctgttgttctacagtacgcagaccttcacgtacaccaaaatcaacaggagacagttgcagagcacgttctacgactttcaccagttgaggtttaacgcctttaaggttgttaaggcttttttgactgaatttaaacataaatcacctcttgtaaaaataccctgtttgggtacacagggtatttatggtttaagaggcgcaacgttttacatgtaactccaaattgcatcttcctcgcgatcgcgtttccagcgaatcgtcatttcaacaatttcctgtttgtcatcaagaggaagtttatcattattgatttgttcaacatatgcttgcgcatctgcttcgctacggaacaacgcatggaaattataatggttgcgccccactacatttcgatccatcaatgaaaaatgactatggttttcccagtcattgtaaatggtaatgccgttaacaaacagcccgattccacgatggttgtacgggaacccagtgacgatatgtttacgacccatttctgctttaacaccagtgatgctaaacacttcatacagaatagcaccaggtttaatgtctttcagttgagcacgtttttcaaaagcattcataatatacacctcataattagttttcatatacagattaccatagtcaggttatctgtcaacagggattatcgttttttgatggaaaagttaactggaacaggcgatcttgtaatgcttcgatccgttcatacgcttgtttcaggatcgtcttatcttctgggttcgttgtctcgatgcagatcagttcgtctgagtcgatagcgatcacatcatccatcagtgaagcgaatatgttcacgtcaggatgtgtcaattcctttatctccgcttccattccgtcatgctgggataacagttcgatgatatcgcgctgtaaatctccctggtacgggaatccggtttgaagatggttaataattctttctgctttggtcatatttcacctacaaaaaagcccctttcggggctgggattaaatgtctttgcactggcaaacaccgtatttggtgaaaggcttgtcaccgctcaggtaagaccagaaatcgcaagcctgttcagcggtttcgaagattgcagcatcatagaagccgtgttcttcgttaccatctttattgaggaacacaggaagccagctttgcggtttgaagcagtcagtaacaactacccaaccttctttcgctttcattgcttctttgttcgcttcaaccatttccagcatttcgttcagtaagttcattttaatccccttgtttatctgtttcgttgtctacgagagagatattatcacaacggggattagtgtcaacagttattcgaaacgaattgtgctatttttgaaaaacattccagagcacacagatcctttaatctgcttgccgttcacaccagttgcttcgaatccggttgagtatgtgtctttttcagaacatgcaaaccacttgtaacccgtgaactggatgttcgtataaccctgtgcttccaggatacgctgtgcctctttctcgtcagtacagcttgactgcaagaacacaacaacgacaaccatcaaaatacacacaacaattttccacataatttatactcttttaaggttagttttgctggcttcgatccagcttacttggttagatccaatatcacccagacatacagttgtatgactaaatgtgttcggtaaagaaacaccatcaggagataacaacaaatcatgtacacttacgctggttgcatacaaataaccaccggacgtatacagtgtttttatgaaatcatatgaatcgttgggccacttgaaacggtatttctggttccagagttcaacttcatgcacatcatattcatcaaacaggggatcgttgccctttgtcgcttcgtaaagcgcaccgcgccattcaactaaatccgcttcgatatcacttacacaaaactcttcttttgcgctcagtttatcaagcatcatttcaatagtgcggattgctccgcttaattcacgatcgagtttcatacaataccctcttcttcgagcacttcccagatcaggagatccaggtgcatcagattccacataacggagtcatacgaacccagcgagcgggagtaaatcactccccatgaacgataagccttttggaatgattcagcactattttcatcgtgcggcatatcgtcaccagaagcgatcaacagtttcagaaccatcaggctattgagcgcctttggcgtgagttcatgttcgcttaacttcatcgcgtaccgttcgatgatcgcgattgacttcggatctttaatacgcccatctgtacggcgcgttttaaacgcgctcattaattcatcgactacggcggtacacttcatatgcttcatccttttcctgtgcagacatccgattatagaggatctcttcgcgctgttcaacttctctcactgcttcggctttcttttcagcggtcagtatgtgatgtactacagcgtttcggatttcccagagatattcaatcatctgcatatcttcaacggtatgatagcctttcgtatcacattcaaatacaatcgcatcgcgttctgacattgctaactgtgcagtagaaggacaaataaccattccagagtatttttcaatcaacgattccagtgtacgaggttttactggaatgtcaaccgttaccggaaccattcgcatcgttgaatcattatgggattgataaatcatcagaatgtgatctccgcaaactgcattctacgctcaatcgcatgaatagcgttatcacgctgttctttgttttcatatccagcccaggtaatcggggttgaacagatcatgtgaaaagtgattgctgggtgtctcttcccttcaacaacgattgttgcatcatcttcgatccaagttacgtgatccagattcaccggatagtttcttacggtaacagtttcaccaaccaaaggcgacacgtccagaatatcacgatcacgaacgtatgatttaatacgagatacgattaacattatttcaactccactgcatatacatcggtttcaggggctttggtaacgatgctcgaagagtcaaacagatgatcggcaatcttattcataatataattctcaaaatttaacgtgggattggaagacagcgcgagcaaggctttcattgtcgaacggtatcgactggtgttgcgctttgctgtcaatgttaacgcgccagaactcactagaaccgtttttcgtggagtaatgcatcagcgttaccgttttattcttttccaggaaggtgcgtttgtcaatctctgttttgatttcgtgttgcatcattttacactccgtttcagtttacgttcgtcagccagttcttttttgtacagtttaatgtacttcccgttaagggtgcgaagctgttggaaaaccttgttgcacaaagcacgtttcgctttgtattccggcgtattacggattgattcgaccgtcatacccatttcgtttttagggtacgcgctcaactccctgccgatctctctgtgccagttgcttaactgatcacgctgtgctttgtactcttcaaaagttaacataacaatctccggtttcgtttctatgtgtgtaaggtatcattaccctacacacaacgcaagcgatttttattttccgtaaagaacacaatattctttatatttttcacgggctttttcttcattactaaaggaaactcccattccaaaatcagaaccttctaacgtaacatcccacgattcatacccatcttccgaataataggaaagtgttattttacgatcttcaagaacaagttgttcaacaacaatatcaatttcagtagtcatagttcatttccataatcttttgctgcatcttcgggggttgcgtccagtcggtaaagctcaacggctaacggactgggtttgatttcgcggttcaggatctcactgataccgcgaaggaattcgatataaggacggaatctcatttgatacgtaccgcgttaaaagcctggttgcgcagttcataagcctgttcaagctgttctgtagtgaacagaggactatcggtgttagtggtgaaactgcaaatggttttgttgtcggcgttaacttcttcaacaacgatttcataaccccagatcccgctgtactcacatttcacgttacggtacttgatgtaaaccgcagcaacatcttcttttttgtagttccggcttttgtagataatttccatgatatcctccttcgtttcgatgtgtgtacaataacagattggggttatagagttttagcaattcgtgctaattatgccattttcttagcgattttccaggcggctttgaatgccggaacatcttcaatatcaacccagaaaccagcaccaaaaccatcatcgtagcaagggcaaccgtcgcagtaattttcccaggtcatcacttcaccaccaacagaagcaccagtttccatagcgcgtaacgcatcttcaactttttccagtttttctgcgttgttgtcataaatgatgaagtaccattttccgttgtattcgttacccagtttgattgcttcgcgaacaagtttcatgatgatttcctttttgtctgtttcgtttctatgtgtgtaatataacaaaacccctaaccataggcaaggggtttttgcaaaaattatcgtttgatcggggtattatctataacccgttgaatttccgaacgcatcgtagaatactggcacaattcggtaagcgcccgatcccatctacctgactatatttctggaatatgtaaggatctgcacctcgatagccagttgcttgatgcttacactctcgtttgaaccatgacattaataatatccttgtacgttgaagcgatcacataacaattttcttgtttgattagtatcgctttggatagaatgcaacatagcgctgatcatgtttaggttattttgcatcatttccgcgctcatgagaacttccatacgcgcacgtaagcgtttattttcttcttccaactcaaccatacggtcatatgctttgatgcgctctaagggcatatcaggacgctctttgagtacgcgagcacgttcaacctcacaagcatgatttgctttccagtggttcgattccgcttcaaatttattaaggcggcggatctcttcaaccagctttttgatcatgtgtggatccatcatgtcgatgaatttcatcaagcaattggattttgtttggttgtcagcaacagaccaagacgaattatacgtaaccgtaaacgtgcggcccatttcatcaacaaccccgatcttgttatcatcggtgattgtagccgcccatttatcccgcatggctgtacaggttccactggcgacactatgcaacttgtttaatgttgcgtcatcaaacacaatttcatcactcatgtatgcctcacatagatttcaaaatacgcagaagtgcgttagtaaagatatcaggaacacaaccaccaaacaacttatgattcatcagcgctaatttcatgctgtgattttcagtatatcgcccgttatggatcccccaggcaacgacattaccaggttcatgaataactaagttagtgagagtaacggtcatgcgctctttatcattgatagagaatgaatagcgataaccggatccgatgtcgccgtaaaggttaaggtctttcaatttcccttgctcatgcaagcgtttcatatgaactgcacatgcatgattaatagtcatttcgtcatccctagcccagtcatcaataccagaggtataacgaatattgaagtagttagtcagttcatttgatacgctcattagaaacctcacttttataaaattctttaccagacccattacagctactgcatttggggtaacggttgttatcataccgccccgaaccgttacatgcaacacatttccttaatttccagccatacacgaacctcatgtaataatcggttcgtgcggccttgcgttcatggaaattcatgctttgtaaacctgaaccaaccacatttcgatgttaggcgcgtaagtaacgtttaccttatgcatagtgcggtatttgtaagcggctttgtacgcatcgagttcagtcggaacacagaaagagaaaccgttatcatagcgttctgcgttagaaacttcacaaccaactacagcggcaatgtttttattcatgttcatgatattttcctttctctgtttcgtttcgatgtgtgtaatataacaaagcccctgcactaatgcaagggctttttgattattttggtaatttttcgattgttgctttcaactcattgattttattaaagagttcatcgctatatttcatcaactcactacggcgtttttcggcccacttgatcaggaattcatgagaatctacaccatacgtgtaaccttctgcactcagttgaatacgagcacgggaaccataatcaacagaactttgttcaatgagaaacttaaccgcatcaagcagggctaaatcttcatgacttaccatgattccttctgcctttggaagatccacaacttcatcctgaatgagttcacgacgggttgtttcttccagtgtttcatgattctggatcatcgtttcgaccggatcctttgccacggctggtttgttttcacctacttcttccaaaaacatcaacatccatccaggaattttagtccggaaagaactttgtacttcactggtgcatgaatttcccagaatgtggatcgcgttgccatgcatatcaactttattgatatagataacgttctgctgttcctgtcggttgctaccataagaaaggaagcggcgtaacgatgtgttatgaccatacttccctaaatcgatttcagccaggcaatcaatgatcccacggttagaaaccttgtaacgcttaccctgtttgaaaaataacgattcttccaggtgagtaggggtaaactcttcataaagaacatagaattctttaggaattttgcgctgaaccaggctcagtttacaattattagaaggaacaataacagcgtgaatgtttccttctgcgtcacacatagcttgcattacttgcggatagtaaagatggtctttcttgcaagtatagctatggatacgactctgccgttttttgaagtaccatttaccagtttcaaaaggcgctgttgtaaaattcattttgcattctcatacatagttaaaattgcttgcatatgttccggtgattgtggaacccctgcaaagttcactttcaaaaagaaattcaaccgatcttttatgttgcactcatcgagtccaagcgctggtaatgaaatgttttcaaaagcacgttgttcatgtctttccatttcaccccaaaacaaacgggaaccgttaggcatcggtattccaatttcattgttccagaatttcatgatagttgtcaagcgttgttttccgtcgatgacttctacccatcgagattcgttgaattcactatcaaccgcgatcgcgatgataccgcaaggaaacccagtaatcaaagtcttcatgaaagcatcttgctctttctgcttccacacgtagggccgctgataggacggattcagatccagatcgttgttcttgaaccagtgaatgtaactaccaaccatgatcgcatgatcgcgactttggaaagtttttaactcacgaatacggtttcttacaatttcgtctgtcattataaaatcaccatccagtatataatcgtaatcataaccgctacagtgaaacacattgcagcgtacacccgcgcattatgaacctgtgttttcaattctgcgatctcttgatccttttcgctttcaaactcttcgcgagtaccataatacccaggatcgttagcagttgccaatctaaccgcatctttttcaaccagcgttgcataaccgctttttatttgtgtcgccccgtaccatccaccccgatcgttgttaatgatcagatggtcgcctttttcgttatgctttgattcaccaacgacaataacccgcttaccattcataatatgatcctcaaaggggccgaagcccctattttgcgttcttctgtagataatctaacagatttccgctttgatgtaaatccaaaactttagaaaacttctctgcgtttctttcgtttgtgagttcgtcgaaatgccatacaccatcatcagctattaacgcgccaggtgatgaacctgtttctacatcacgggaaagcgcaagccccagagggtgtaagatttcgcggttaatgcgccaaacaaggcccatttcagatagagtattaaaatcgacgtatttcatattatgcctttggtttcacaccgtaggccaacataccaaaacgatgatcattatctgcatctttaaacagaacttcgttaccatcaatgcagatgacctttgcttccggatcgatgtatggaagcaaccacaaagggatcaggcgtaggccgctatgttcatcccagcgactgaaattgagttcttccagttcatcaagggaaagctcattaggatcgatataacggaaccatttggtatttttgaggcggtcggggaagtttacaatttcttcatagccgaattcagcactccatgaagagtaaacagtgacttcggatgctttggttaaaacagcatcgcgaattgatttgcagatatcgattaaagtcagttgattttccatgatatatttctcatcttgctaaaattttaggcaaaagttgccccatcgttttacgtgcatgtgacggaatctgtgagatcgggacatatttaaaatcatccatttcacgtatagtccgtccgttcttaacgaaagttgatgcacaatagcattcttccgctactgggtaatcttgccctacatagaggaataaagcaaggttttttgttttcgtgtaatcgagaacacccaggctaaccaattcctccgcgaacacttcaaatcctgtttcttcgaagcattcgcggatcgccgcgtcaatatgagtttcgcccttttcaacatgccccttcggaatatcccaatggggcgtttcagtggcatggcccatcaacacggcaccatctttaacaaagataatacccgctgatagttccatttattcacctgcaaaagcgttatcaaatgcttcaagtgcgttgttagcgcgagcactggcttttgtcacaccagcctggagattttcaaagaaggtatgtttccacacttcgcggcgactggattcatgttccagactgtttttgtgatcgccgcgaatctgttcttccatgtcataacggtacagatcgagttctgcgtttaatttctgttctaatgcctgtgcaaatacatgttcaatattcattttgtatagcctatttcagatttaaggttttcgagggtggagtgataaacaacattcccttcgtgtcgagtataccatacttttccgttctggttacactcattcattacattttcatctaaaccagggatcggcttcatgctgggagaaaacgcgatagacatcatttgttccgcactatcagcaaacccacaagggaaaacagatccagttggtttatcaagatacatcaactctactttagccatagatttcttcgaaatcctcacaatcaggcaaatacgtttcacagaaggtgcaaagcgtaaagaatgcaggttgacgaataccaggattatccggtagatacatccagaaggtgttagcaaacacgatgaatgttttcaggttttcggtggtgatttcgctaacaccatcatacccggattgattgatcgcgcgttgcagtggcacctcgtactgttcgcaatagtcggcataatgatcgcttgttacaaggccattagccattttaatcaaatcgacgattttcatgattttacatattccactttaacaggttttgcaacaaatttatctttggtgcgcccatgaccattacacaggtcacattctttgttgaaatctttcatatcttcgacccatccagaatctggcaacccagacggatatgcgttataacgaatggtttcataaccttttccgttgcatttcgggcaaacatgaggacgttcttttttagcagactctgccagttcgcgaagggtggtagaactaccataagcccgacacatgttttcaaagtcttttaaagtcattctataaacatcaatgacgttatattttttgccggatggtttagccataatatatttctcacttaaagaattttttgatgaaagagatagcaaggccgataccaaagaaaattaagtaaccttttccgtcaccgtgcgccaaaacatagagtgagctgccgtatgcgatgagttctgcgatgttcattaagtttctcatgatatcctcctttttctatattaagtatcttaccataatataaaccaaagtcaacaacaaagttttatcaacccacttatcaccagtcattagtaatcccctacaggttgagacgccgcaacactcaggatcttgaaagtgcaattgttccactcacaatacgtttttgcacagtgaacacttcctttcataacaaacccgtttgagaaaattaaccagtaaagtttcatgatagcctcctttgtttcgacaaggccaatataacaaagcccctgcacgaatgcaagggcttttttcaatttttcaacatccaaagttgcggaggacaatctttagaagcgattagacgatccaagcgggacataacccgacgataaccgtcgtattcaaaattaatttttggtggaacgtagtttacctggattgtttttctgttagctaaagaaacatactcagggatcactgttcgcaaccgtatagcgatgactggcttctcttcgccttcgttaaagaacatttgaacagtgataggacaggcaaaaattttaccatttacccgacgataaacaataacttcctgtgtcccttctgttttggccttcacagcgtaggttagaacataacacgaataatgatttgctagactcatcatgatatcgcgataagtttcaatatcttttttaatcgatactgaacggtctttaaagcgatctgcaatgtggtcagcagtagccgctaccttgattgtataccagtcacctaacgcgctagtaaacgcctcgctaacttcttttcgtacactgttaacaagatacattaaacgtgttctgttcatataatcctcactgatttttgaagtattcgatctgacgcaaacgcttttcagcggcggctttcgaatcgtattcaccaagttcttttgtgcgatcgtgattcaaaacaacccacttatcgccacgctgttcaatgtgttctgtaatatcttttaacgacttatccagatccagtgattcagcctcttcacagataatagtcaaatccacgggcagtgtcaacaacctttttactccgctgatatcatcaagcatcgaatcgtatgcaagggttacgtgcggtttgtaatccggataatcgtatgttgcgccagcatcaatagaatctttgaaacggctatgcaggtattcagattccaggatccctacgatagtgctaccgtattttgtgtcccacttttcaacatcaaccagtttagcaggttctgtgatgtcctgttgcgggaacaaatcaaccgttttccggctgtatacgatcgttgtatgcatcttttcggctgaaacagcattctttgtgatacctaatgtcttttgaacatttttcaaagcctcacatgaagcctgatcgaatttagcacacatgtagataccaggatctacaacaggttttgtgatttcaagaaatgatttcataaaacaccccaataaaaaaggggccgaagcccctttgtaataaatttgtttttacgcttcttcgccaaaggcggcttcatcttccgcgcctttttcgacttcaacggaagggatcagagcggataccgcgccaatcactgcttctggggttactggctggcttgcgtcaatacccagtaccgaacacaggtcggacagaagttgacgatgaacagagagttcactttctttttgcgcgattacttcgttcagatcgaatgcgcggcctttcagtaccagtacttcattttgcagtttttgaatatcagacattttattacccattgttaaaatttaaaagtatcgagcactttgctctttagttgtttcaaagtaccttcgttagtgatgatactatctcccggttgaggtgtcaaacctttttccgtggaatgttcatcaacaattccggtatcttttacaataaacacaaacttagcacccaagcgtttcaggtatttatattcgtgttcctgacgacagtcagttaccagaagatgattgtattcgtcaccagcatatttattgacgaatctttccagtgtgtaacgaacccaaaccgtgttatcatacttgcatacgatatcagttccaaacacttgcatcaagcgtctgatactccagggagtatcgttactcataatcaggttatcaatatcatcaggactataaacaatattgtatccacgttctttgaggatttcaagcccgattttgaaaatatttagaacatcttcattagacatcacaagaggtttctctcgatcaccttcataaaaaatagcatccggatcagaatattgtccttcaatcatattgcgaatgtatggtttatcgtaaccatatcgctgcattgctactcttaacgttcttttgataccaaatgccagtgcttcacactgaacatcattgtacgcctcttgaataaatttagcaaccgtatctttaccagttcgcttttttccactaatcacataaatcattagctcattctcttttgagaagtgactacttttccgtcaatttcaacttccatatgaaggaagccaaaagttgccatacatgtaaccgcttcatcactatcgttagtataacccaattcaacctcacccaagtttgttgggaaggcaccataaaatctaaatgtggcgatcgttttcatctgggagttatccaggatatgcacagcgaatgattgcttaggatcatcccacgcaacagagttaaactcattgtaatcgtttgtgctcaacatccatatgtaaatcccaagatacgatctcatttcctcatcgactacaaagcggatcatcaaaggatcaaactcaaaagccgaaccaggtactttacctcgaaccatcatatttgcaggaatatcaactgctgggaggttcattgatggtagtgtaaccccttgaacttgtaaagtcaaacctttcatgtaactgttatcaggaatatcaacccgaaagtttgtaggtgagatttggtttaaaatcatttctgtagacataggatctcctttcctctatttagcggggaacgggatcaaagcggcctgacggggtaatataaaaatttgaagaaaatgcttgaccttttaaaatctttgatctataataattattaattaaaattttatcaaaaagatctaacaagatcaagtaaaatttaataaataatttattaaaaattttagatctgatcttgaattcataaattttatgatctataatatattaatattttattttatcataaatttttatgaagatcaatacttagatctaataaattttatgctttttctgaaaacttttcctttaccccgtcactaaatactggtactatgttcccatattggaaatcaggaaaaacaaaatgactcacttgaaaaaattcaaagaatttctgaccgaaggtaaaaccctcgctcgtaccgtagcacgtggtcaacgcgctaaaacttccgataaacattcaatcggttttcttcacttcaaacatggttctgatttcgaagttttagcaccggattctcacgatctggcataattcggtaaaaacattgtacgtttgaaaggtatgactactggtaaagttcaagcggcttatgtcgattgggctaaaggtactgtttctttctacagtggcaatccggatgatgatctggatttcgacaaaccagaaaaattcaaagctgctactctgtatgaagaggcggaagaaaatctggatctgtataaccagttagcagaagatttcgaaatcgagatccctatggatgaagctctggtgaaaggtaaagtttacaaactcccaagcaacgatatgcgtcttctgtacactgggcgttctaaaactaaagcaagcggtgaatatgcagtgtttaccgtagtcgatgcttccggcaaacctcgcctggtatctggtaaaaaattcacccaggaatataaaggcgatatggtttctaaactagttctggttgaatccgaagatctgaatgaagcggctaaaggcattcgcgaaaaagttattgctgtgatggtgaaacgcgggtttaacgaaaaagatgcagaaaagatggttgacaaaaacctgaaagatgctatgaaagttagacctggtgcgacccctggcaaacttgcagaaatagttagcaccctgtaaaaataaagccccttccttccggttggggctttttgattagtatttgctccagacttttttcgcgccgtaaggtttccctttggacataaattgttgagtcggtagccaaacagctttcgcccaatccttcggggcaatctctgctaatggtgatttgaggtgtgatggtagatatgctttgatcatttctgttgcgcctcgcatacctttcacgttaccccagttaattttgagtacagtcttgttagagaggcgtttagtggatccgtaccctcgcttcaataactcttctaaaaactcctgtcgtgctctgggtggcgcatagtgcaagttcaaaccatagaacactaagttacccgctttcgatcttccggatcctaagaaaataatcagtggaaatctatcccaatacggcagggtgtctttatattttgcatcatatgcaaacgtgtacaggcgacccgttgctggttttgccacacggtgtgttttgatactggttttgatgaaattaccaaaccattctgttgaatctttctgtcgctttgccgccgatacaccaacagtgatctttttcagactattacggaaatcgttgatgatctcgatcccgtgttttttacggtagtcattacgttttttacgggcttctgtctctgcggaacgtcgttcaatctcatcatcaatctgttttttgtaacgatgcattgactttgtgaacgttgcgtagtttaatccctcagaatcggcaaaacgtttagcagaaacacctttcgttcttgccttacggaatttgatccccagttcaacccaatcactcaatttgcgtttgggtggtgctttgggtttatcctcttccgcgatgatctcaaactcaaaaataaaactcatgtttccctccagggattactgacctcgccacccaaaaacttttttgagtgattcttctgttacgattttgaactgccagcctttttgacggcatagctcatttgcggctttccacttatcaatattaactgtataggtgtaaagagcatcaataaatttctttttattgtgtacgttgttgtttactggcttcggtggaggcatggtttctttaaggggcttaacctcccaaagatatgtagtaccattttccatttccacatagaaatccatgtaatagcgtcttctcttaccgtctgcattgcagaaatacgggatcactatacattcagaattccaacgttttacgtgtgggtttttatccagccacttcataacgtagcgctcccacgatgacctatacgtaatctttcgcggatcgcctttatacttctgtatgttttcgggtacaaacgaccctttatacgtctgtcttccagccattgcgtaaatcctaaatagaataatataacgtttagataggggaacttatcgtgctattttcatacttcccgcctgttgattacaaaggcacccagacaactgatattttccgagactatcgattttattttaatcgtgtgattggaaaatataaaacccgtagttaccagataacaggcacactacgacctgaacaacttgcagaatcattatatggaaaccagcaatactactggatcctgttgatgcttaactctgtttatgaccctttctatggttggatctccgatcaggaagccgcgtatcagtgcgctatacagcgttattctgaggttggcggtgaacaggttctgtatcacgtagatgaaaacaacaacaagtattataaccttgtcgaagaccccaataaccctggtcattggtatgacaaaggtgacaaaccaatgctgtatttacagtatcaaggtgtattagctcctgtagatatttatgaagatgcagtgttgcaaaatgaagcaaaacgaacaataaaaatcattagtccgtctgacatccaggcgtttctgaatgattttattaaagaaatggaaaaggctaactcatgaaattaggcggaaatttacactcacctttctttgatggggtggttgaaaacgttgatgatccgcgcgggttgggccgtgttcaagtccgtgtatttggacaacacccagcccaaaaacaaaaatccgatgcaatcggtgttcctgttgaagatttaccctggatgatgcctattcaggatattagaagcgctgcgatctctggtgtgggcttctctccaactggtatcactcgcggatcctttgttgttggttattggcgtgacaaatggcaccaagatggtatgataatcggtactgtcgctggtgaatatgtcgaacaaccagacacacagaaaggtttttgcgatcctatgggtgaataccctcgctatgttggtaacgatgttaactcccttgcattaggtggtttgaaaggcaaaggatcatcaagtgtcatcattcgtgattcaaacacaagcatagcagtaaacccagacgatcgcccactggatgagataccagaagataaccgccctgatacgggtggatttacgatcgaaaagatgctcaagcaggatgaggggatccgtacacgctggtatacagacagtgaaggatatccgacaatcgggatcgggcatttgcttatccgcgaaaagactcgcgacactgcaaaaattaacgctgcgatcagtaaagcggtaggtcgagaagtaacaaacgggacaatcacggcagaagaggtatcaaccttatttgctcaagatttagccaaagtaagatctgatattcagagaaccactaacgtccgtgaagtgtatgtgaacctaaaccgtcctcgtcaaatggcgatcgaaaacatgtcgtttcaaatgggcgtcggcggtgttgctaaattcaccaataccctaaaagcgatgaaaaatgaagattggcaagcggcttataatggtcttcgaaattcactgtgggctagtcaaactccaggccgttcttctcgcgtgtctaaaatcgtcctcacgggcaaccttgaatcatatggggtgcaagtaccagatccggaagggcgctctctgagtgctgcttacgctgcgtataacggtgctacattgtcggctactagtccggaagatccgtttactcctggtgatacccgtgtgatgtttgaagaaccagcatcatcttataatgcggaatatccgtataacatggtgtttgaatcgagatccggacacattcaggaattcgatgataccccaggatacgaacgatataaccgtgttcacccagcagggagttacgaagaaattcgcccggatggaacccgcgttgttaaaatcgtaggggatgactatcagatcgtgatgcagggccggaaactcaacgttaaaggcaacttgcaggtagttattgaaggtgatgcgttcatttacaacatgggtaacgttcaacaaacggttgatggtaacgtaactgagtttgttcgtggcaacgttcaacaaacggttgaaggtgagtacgttggcctgattaaaggcaatgctgaactaactgtaaacaaagatgcaacagttaacgttgatcagaatcttaccgcaaatgtgaaacagaatgcaaccgtagctgtaacagaagacgcaacagttactgcaaaaaatgctaaaatggagattgaagaaacgatggatatcggtgctaaagatatcaatatcaaagcaacgaataacacgtttattgattctggcgcattaacaaaaatcaccggaggaacggtacaggttggataattatgaactatactcgcatatacaacgaaataattagcaataggaaacaaaatcctatcaatggtacagtagaagtacatcatattgtaccgaaatcgatgggtggtgataattcagagggcaatctagttgccctttcacctagagagcattttatagctcactatcttcttgctaagattcataataataaagagatgtggtgtgcatactggttcatgtgtaatacacgcgatgttagaataacttctcgtcagtatgatatagctcgtaaaaattccagtatacatttaaaaggaaatacgcatacattaggtcatatcctttctgatgaacataaaagaaaaataggcgatagtgtacgtggagaaaaaaacggaaattacggcagaaattttacttctgaacatcgtaaaaatataggattggctagaaaaggcaaaacccatgatgcagaatctagacgcaaaatgagagaagccgctaaacataaacctaagattagttgtcctcattgtggtaaattgcttgacataggtaattataaacagtggcatggcgataaatgcaaaatgaaggtaggctaacatgattatggattatgaatcaataattgatggaattatgcaaaattatcagcatccttgtgatgctaagatccccgctggctattatcggcgggttatctggcaagggcatacagaaaattatccggctgttggggttgagtgggataccgagataatcaaaatcggtactcatctttatactcaagaacctttcggacatagaagcacggatctacctgttgtcaattcaccgggaacagatccaaataccggacaaccaacagggatccttgttccaaagattggttattatttcaacactcaggcagaaattgatgcttacattacatccattggtgcaactaaaatcaatggtggtaatgattggtatggtgcggatctgtcaaaatcaaacctatacaaaaaccctggcgaactggctatgtataaggttgaaaacagtggcgggtatctttccggaacaaaccctgtatgtgatgctcgcatacgtcaggcatataatcaggacactggcgcattcaccaatattgattattattggaatggtaatcgtatagcctatatgaagcatgacgaaacaggggcgcaccagtgcaaatatactggtatgcaggttaacaccaacgcagatacaagcattcctcctgttcctcctgcaatgccttccacttatggggcattaccgagtgaattaagccgtgctgatatttcgtgcattccggcaactgttggtttcgcatatacaaatatcagtgatgctatgttacaggcatggaacgaaacccgtaatacgttcaagctacagtttaacatgttaacgggtgctgtacagaatggattcgggatcgcgacaatgtttgatggtttatccgtatcgatggaagaagtaatggcgggggcgctcgcattgtcacagcaagcatggcaaactgctatgaaagttttcagacaagtgattagcgctgcatttaacattatcggtggtgcatggggattgattaatcagttcttgcctcaagtaaccatcttaggtgttgcgatcaacatttacgatctggtgtttggtgataattctgttcagactttgaaagatgcgtttaatgcaatcatcaaatccggacaacaaacatatgaaaccgtcataaacgcaatatacggggccataggaagcgcatacaattactctgtggaatatgtcaaagctggcgctcgcgaccttgtggatgcttgtagcgcgttatttgattggtgtttaacgatgttccaaaacggttgcgttgcattaatcgacttatacggtcggatcatgcaaacatgggctatccctccggaagtcccaaacccgttatggtctgcggtgctggctatccgtaacatcatgatgcaaatcaaaccacttgatataattctgggcggtaacttccctggattcactgcaatggatttgtatcaacaagcacaggaaaaagtcaaggcttttgttgatgagtcatacgaacagatccgagggctttatgaacaggggcaggaactttacaaaacgttaaaaagtcagattttcgaacgtgatgcaattcagagaaaattcaaccagtacttaaactggatgtggggcgctgtaacagacgaagcaacagcggcttatcaatctgcattggatgctgcaaacgctgctgtagctgcaacacaggccgcgtatgacgctatacaggaacagattggatctctacaagacgcaatgaaagatacatacagcatggcgatggaagaattaaagaaattgcctttgatgagtacaataaacgagtttttaggcttctgtggtgtcgcatttgatgatcttctcaagtcatatgaaaatgcgattactggtgctcagtctctgtacaaaaatttcattgatagttcgcgctcgtttaaagatcactgcaaagtaatctataaccaaatttgtacgttggcgttgagtaaagtcacacaatatgtgaataaattgctgtctctcataggattagcaatcaacttcggttcgattagtgtatgtgttccagtactgaaatactaaatagtcgaatgatcaagaggaatttataataatggctactgctaagactaagactgtcaaaaaacagattaaccaaatccccgatatctttatcgggggtactttcgaagaaattaaaacagatctgattgattggctgggtggacaagaagagtttaaggattacgatttttccggctcgcgaatgaacgtactgatcgaccttctgtcgtatgctactctttatattcagcagatgggtaacacagctctatttgaatcgtttattcgcacggctgcattgcgtagttctgttgtacagtctgctcaagaactgggatatatgccagattcgcgcacggctgcaagtacagcagttatgattacggctgctaacccactgaccccaacatcgatccgtatcccgcgcggtacaaaattcatcggtactgtaaagaatacagacagttattcttttgttgtatcagatgacgttgttatcgttcgtgatagtaataacaactatacatcaatgctgaacctggtgcaaggccgtttagttcgtactgaactaatttatgacggttcgagtatcctgatccgagatccaaacattgaccgtagtcaggtacgtttaactgtaaacggcgcacaatgggacgactggacaaacgaaagcattgtaaacgcaacaggcgcaagcacgatttactacatgcgtgaaactgttgatggacataccgaagtttatttcggtgaaggtgaagcaagtcaacaagtggcgggtggcgcactaaccgccgaatatatcgggggcttgaaacctgctaatggttcgactatcgttattgaatatctgtcaaccgatggggaagcggctaacggtgcaaaagattttatctatgtcgatacattaaccaatattagcatcacggcgattaaagagaacccaaccaacacccctgattatgtcggtgctgatggtggtggtgacccggaagatatcgagcgtattcgagaactagcccctgttatgcgtgaaacacaacgccgttgtgtaactgcatcggattatgaatccttcctgtctcacaggtttggatctatcatccaggcggtacagtgctttactgataacgaaaaacctggttatgctttcatttctgttaaaccaaagtcaggtttacgcctaacatcggtacagaaagaagatatgcaaacgtatctttcgaaatataacctcgcgacgatcaccccgtcgattatggatcctaactatctgtatattgtgcaatctgtaaaagtaacgtatgatatcagtaagttgacggaatcagaggaatggttacgcggtcaggttatttcgtcgatcgactcttactatactgacaacgttgaaattttcaacaaatcgttcagtgtatctaagatgttgacttatgtcgatcagtctgatacttctattatcggttcggaagcagatattaaattgctccgtgaaattgacaactattacagtgctcctatgtctgggatccatttcttgaaccaggtggaatcgaaatcaatcatttccagtacgttcaagttcaccaacgaagaagacgaaagttatgttgttcgttatgcttctacggaaatggatcaggatggtaacgcaaaaattgtaataggcccgttcaaggatggggatatttcgatcgctgcttatacaggtgatgactttgaaaaattaacagatgcaggaacccgtaataaatattacgaagtaggatcggtgtctcattataccgatttcattagctttgatctgggcgttctgaacgtatccgccgatagtttcagtgctgcttatatcgagctaaccgcaaagcctctcgaagaaaccatttttactcgcgatggatcgttgatcgtgtttgaaaatgacctacgtcctcaatacaccacattgactatgaatcctatcagtcaataatcgttaacccctgtcttcggataggggtttttctttttataaatacgtgatatacataaccgcaaatttggagaaatataatgattaaagcgccttcgattacgagtttgcgcgttgataagctggctgctaacttcgtttaccttaaatgggatgatgttggcatggatttctattatgtggttgaattggcccgtagccgtgatatggacggaactattattccagacgaagagttaatctggacgcagttgggttatagctacgaaaacgaatggtttagcgatcaggttgccccaaatacacgttataaattccgtattcaaacaactcatgaagggtttgaaccttctgattgggtgatcagcgatgaattatggacgtttgatgagaacgcctacgcatatacaaccatgcgtgaattcacccctgctgattcgtttatcaatgaaaaattcgccaaaaacaatcgtgattacgtcgattttaacgatgatgttattatggcttctctgatggttgaggattttgtatactctcccctgtattctgatgtaagccagatcagcgataagatcctgaaacaagaaagctaccatgaaattcaagatcacatcgaacacgtttgtaatgatatagatcgcacgttcctggtatactcaaacggattgctttacctgtttgaacgttttcagaatatggctaaagtgtcaaatgacaaaggccaaacgtggtattactacaaagcattaaacgatcgtgtaggcaatccggtttcccgtaccgttgcttatcagagcgctaacactacgtatgtgttaggatacgatcgcatattttacgggcgcacgtcaacagatattcgttggtcttctgatgaagttcgtttttcttctgatgatgtaacgtttgcgaagctggggaaccagtcagggttagattttgatgttgattcatacaacacatatgcgcgtctaccgggaggagtgtcgaagtatgccgaagctatagcttgttctaatgaatggctctacgtggctgctaagaacgttatgcgccgtattgcgttacgtaacacaccaattgatactgatcctggttcgccgacctttggtgaacgtatttttgatgaagtttcatataccatcgtaccaggaaatgataaaattgttgttaaaaaaatggacgtgctgaatgaccgtctatacgttctggtaactggtgaagttaaaacggcgatgatggatccgactgtcaaagctaacgtgatcccatcaaacgatgctggcgtttatctgtgggatgagaatgcaaagacgtttacccgtgtttatggtaaaaccgaagatgaacgtttttatatcactcatgaatataccaatatgtcaaccaatggcgatgaagtttacatttctgttggtaactacaaatatccaggcactttgccagatccagatctggttgaaaagtatccggaagatgtgcattcagcggtgaaatacgatcttgttcctggttatactgcgagcatttcgattaactttgctacagttcgtgcaaatcagaacgatcctacagtatggaactttgggccgcaagagtactacaatgaagcaaactttagctggcatttccgcgataaggttagcacatggatcaccaatgataaccgtcctctggtggtttatccggaaaccctgtatactctggttactgatagcgcgtctcctgcgtcaacgattcgtgtaaaccatgaagtttgggacaaaggaacagttactatctacttgaataatatcaagtttactggttttacgaagtacacaaacggtgttctgttgtatcgctcaggtggtaggataattggattctatgaactgtcataccgcgcaagggatgaactcactattttctggaaacccgataacactttaatggtggcaagtctggttaatcaggaacgtgaaaacccatatacgccggatattgaacctggattaatcgaccctgatctgagtcacatgatcactcgttttgctccgcaaagctatctggacaaccaacagttcgaaaaatttggtgaatactatctgcaatacatttcgttgggaagcaacagttactataacaaattgctgaacctcatccggaacaagtatccgagagagaaaaacaacgttgaatatttgtggtctgaaatcaaccgccgtaacatttacctggataaaaccaaacgtgaggcagtggttagatttttcgaatcacgtgcaagtgatttctattcaacaaaagggatcgaagcaagttatacgttcctgtttaaattgctgtataacgaagatgtttccgttgagatcgaaagctccaacagtctcgaatatgatattttggttagttcaacaaatatcagtcaggatatcgtaggccggacgatctatacaccaactggacgcgctaacgttacatacatcgaacgtgactatgaaaatggtcaattgcgttggtcaatgactctgcataatgctcaaggtaactttatcgaagggcaggttgtcaagtcagaaaaaaccaatttcaccggaatggtaattcgtggtgttcgcggtaaacaaatggctaacaactcgatcgactatatcaaccgtggacgatcttactatgtgatgaaaattcgttcaaatctaccgacttcccgttataaggatgacgtattgaggtttgttcatccggtaggattcggctttatgggtattacgatgttaacagtattcatcaactctggtttgtcaatgactcataacgagacaatcattgatattctgagaaactaccgcttcgatagtggttatcctaagttctggcctgatcgcattgcgagtatggacggtaacggaaaccaacaattcgacctggttactggtgaacctctgtacaccgtacacccgcgagcgggggaaccttttgatgtacctccggaatatgacattgaagaaaaaccgcttaacggtgttcttccttctgcgcgacggttcgatcaaagtccgttgttcgattgctcaggcgttaaatattcacagttccgtaatttggtggataaacgactgaaagatgatgcaggaaacccacgtgatccaaatcctccatcacagattaaggtaggaaattaaatggcacaacaaaacttgtatcggtcggtaattactgcaaaattccgaaccgaaaacttgatgaacttcaaagatatgatcggcgatgccgccgatctaaacacgatttacatgtctattggacgaactgaatcgtggtcggataacgaatccgaccctaacttcgccccgccatatccaaatgatagcaccgatggtgttagtgatatgtggacgcatatgatcggggctactaaagttcctggtgatatgatagatgcaattttaccacgtaaagactggggtgatactcgttatccaaacccgaaaatcttttactttaacgatattgttgttgtaaacaccgcaccttataaccgtactgatccgggtaaaggttggatggtttatcgtgtggttgatgttcctgatatcggttcttgctccatttcgagcattaccggaaaacttgaatgtatcaggatcggcggtatctggagtccgtctcatgaatctagtgaacctccacgcggagaagctaacgggatcgacatgggagacggttataaatgggaatacctctacacaatcccgccagatgtcgtgatcaaccgctgtacaaatgaacatatcgtagttcctttccctggcgaactggaagaggatccggtacgttggggttatgataacgtgattcaatggtatccaggacaatacgatctagtgtatcggttgaaggtgaattcaatgcgttttcgtgcatacatggattctcttttcttcccgcaatctacgcttcctggtaacaaagggttccgtcagataagtattattgtaaacccgttgattaaaaaggcaagcccgaccgagcctgaaaagaaagcaactggtgattactataatgctaacgcgcttgaacctgattccggacgtatgatttacatggaaaacagacaacctattattcgctcccttgatcagactgaggaagtgagtattgtattcgaattctaaggaaaaacaatggcttaccaaacagcaaaaaaactaattgatgtcggtgaaatcggcaacccatcaacaggcgacccgctttatgatggtggtgttaaactgaacgaaatgatcaccaacgtttataatgcgtttggtgatgtgcgtatgctgtctgcaaacgaaggtgtcggtaacatggtgatccatgctaccggatactatcagaaactaccacgcacttactattcaaacacaccgatcgaactgggttccctgcatgacatagatacttcaacaggttcgattaccgttgttcttccttctggtaaggttggcgaaggttgctacttcataaatagtacgggtagtgtctctgttgatcgtcctatcgcgtttcgtcctcaagttggggatactatcgcgggggttgcagaccagttgtatatcacgtcaccttacacctttgtaaaaatctggtgtaccaaaaaagaaggtgcggtaacaaaatgggattattctgtagaatctatgttcggttctaaaacgatgcctgttgacactacggcgcttgtactgaaagcaaacccgactgctattcctatgttcggatatagcgaatttagcggggctaaggtgcttgtatacgcagaaaacttagctggtacagttaccaaaatggcagaagttttaatgaccgtggatcgtgtacacaaaacgatttattcaacggaatacgctattttgaaaaacagtgaagatgaaatgtttacattaaactttactgtcggtgctggtgatgtcgtatacgctaacgtgcaagcgatcaaagaagatcgaattaaattcacgattaaagcaatagatacgattaaatcagggatcgcgtcatgaaacaagaaattttaataggtcagattgtagacgatggtacaggcgattacctgcgtcgaggtggtcaaaagactaacaacaactttacagaattgtataacatgctgggggatggtgagatcccccatccagcaggtgcctggaaaacttttgcgggtacgacgctatcaccaaaatttggtgaatcatgggcgttgaataccagtgcaaacaaaatcaccgtaaacctcccgaaaggcggcgtaggcgattataacaaggttattcgtctgcgtgatgtgtggtcgcgttgggctaccaacaacgttagactgatccccgcaactggtgatactatcaaaggttccccaactcctaaagatctgtttaaagattttatggatgtggaattggtgtattgttctccgggccgttgggaatacgtcgaaaacaaacagattgacaaaatcacaacttcggatctggcaacagtagcaaaagaaacgtatattgctactcagggacaaactgacttccctaacgtattcggtgttggtaatgaatacaacctgcaatcgttcgaagtttactatcgcggtaacttgctgttcatcgatgagaaagacggattcaatgctgataactcagactatggatcgattggctctgctcctggtgaactggttgcacttgatggtaattcagtacgtcttaaaaacccgtgtaacgctggtgacacgcttcaatttgttacctatctagatgggttagcaacatggcgttcgagctatgaagcgtatgtgatgcgcatgtatcagactggtgatacttctctggaaaccgttcctggtgaacagtgggtaggtgatctggcaaccaaaaaagagtttacacctgctgaatttggtgttaaccctcgcgtgttgattaaccctaactcgtttgaactgcttctcaacggtaaacaactggttaaaggcggtgacgctgactatccggcgttttcctgtgaaggtgcggaaggtgttgatgaaagtacgtgtgttggtaactctggtgtatgggttccgtcaggacaggattatagtttagtattcactgattctgtagtgacttcaatcaagtttgctcaggaactggaatccggcgacgttgtaacgatccgttggtttaacaatgatattggtactctgatggattgggaaggaactggcggtattaaagaaaaagctgataaggtttatctcaataacgaagaagaagttatattgacgaaccgtatcgaatataccgattataataacccttctcagaaaacaatgcgtaatacaggggaaacctatcaggggcgtattctggatattcaggctatgtttgatattatccacccgatcggaaccatctatgaaaacgcacacaacccggcaaacccttccgattatatgggatttggtggttggaaacgttacgcagaaggttatttcctggctggctggacatcaaatgcaacggatcctgatttcgcattaaacaataatgatttagatagtggtggtcaaccgagtcatacggcaggtggtactggtggcgatcgtggtacagaaatcaaaatcatcaacgttcctgaacttgtatcaaaagataaagttcttattgctgatgaaaatggtgctgtgatcattggtggttgtcagttagatcctgatgcttctggccctggatacactaaataccgtgaggatacattgaaagtgaatcatggtaacacattacctgataaaatcaaaactattccaccgtatatgactgcacatcgctggataagggttgcataatggcttacaaaaatatttcaaaaacaagggagggcgctcgcgtcctctctaaaaaagcagattacttacagtatgatacttatggtaagttgcctctgatcggcggtaaacgttcgatcggagaaccaaacattgaccaaacaaaacgcggtgttctgtatggaaacgtacaatccgcaattgatgacctgtatacgcttatcgagcaaatcccgattaacggcgttgttaccatgactgaggatgcccctccaatcgctgtacagcaggttgagagcgtttcttttgatggtattgtacagaacatcgattcagaccaagaacaggctgtagttcacgtgtacggctttcctttcatctttgataatgggactaacgccgcaacagtttgtgaaacggcatacaacaaatttactgaattcgttgcagcggaaaaatatttcgcggaagttaaccgcaaaggtgttgatggtacgatccttgaatgtcgatttattgatagtgttccgcacccggcaacaaatatctcagaaaacggtattcgtcaaatcggaactatcgacgtagccgcaaaaagtggctatggttcatgggttaagttgggttctggtttcttacctgatgttactccgcaagtaaccgtgtattacttcaaacgaattgcataaggataacacatgagtaacaatacaatcaaccacgtaagtgataaatccatttacgtgacatttgacccaacaggtactgattggcctgataccataaccaacgtacaagatgcgttggaaaaaataggtagttgggcgcgtactgatactgggcttcctatcgcaacaacttctgttcgtggtattgctcagatcgcaaccgaagctgatattaacgctggcacggataacaataagattgttactccgaaactgttagcatatcgtatgcagaaccctaaagcatcacaaactgtatggggttatacgaagtattcgactgatgcggaatctacaaccttaactaacgatgcatcgtctattactccgcgatctctgaactatgtgttcaataaccgtaaaggtacagaatcggtttggggttcttctaaaattgccaccactgcacaggcggttgctggtacagataacactgtaactatgactccgcttaaagtcaagcaagcgatcgcgtctctggttccggttcagtcaagtgcaaccgaaagctcgcaaggtctggtacaactggcaacagttgcacaggttcaggctggtacgatccgtgaagggtatgcaatttcaccttatacgtttattcgtttaactgcaactgaaagcaacctgggcgttattcgtatcgcatcacaggcagaagcaaacgcaggtactgatgacaccaaagcgattactgcgaaaaaattaatcaatacccgtgcaactggttcccagttcggtgttgtcaaattagcaacaactgttggttatgtggcaaacaccgcactttcttctaatgcttatgtattgcctagcgatcgtagtgcggtaattaatggttctctttatgagaatagcgcaatacataacaacaaatatcagacgtggacagatcttgattggcatttcccagtaggtgctattgtcatgactggtttccagactgaccacggtagtttgtatatttgtgatggacgttcactgaataaaaatgattacccgttactgtttgagcgtataggatatacatttggtggtggtggtgattggtttaacattccagactgtcgaggcgttgcagtacgtggtcatgaccgtgggcgtggactaaaccctaatcgtgggtatggtacatatgaaggcgatatgttgggctggcacgaacacccattacaacttatctaccagaacggcggtaacattccgaaatggcaagcagtttacgaactgaaaagcgccgagaagaatgaccaaagcgctcgcgtatttgatgcttctataactaaagctactggtgtgggcggtgaagaaacccgcatgaaaaacatcgcattaaactacgtaattcgtactcaatagaggttattaaatgatcatcgacaaattaaatccgttgccgaagatcccgtttgttgatggcgtcccagatgacgccacgactcaaacgaagattatttggatcaaaaacggtgaaactctggacggttcgccagataaagtgtcaaacactggcagtcttaaccgaactggtgtaaacatccagcagaacgcggttcagttagaacaaaatactatcacccataatgataaaatcaacgaagtaatcgatcaggttaacttgattactgaaaacattgatgctattggtgatgaaagcgtaatcaaaaaagttaaccagttggatcaggatgttcaggcattaactttatcgaacacccaaacacagaacaaggtagcacagttaaccctttctgtaaatgctcagaacgatgaaattggtgaatacgatccagaaaaggatcctaaacaccgcacaattcgtaatgatatcatttacatcaagaaagaagttggttcatatcctggatttaacgttgatggtgatgttgacccctcttctactggtactggccttaaataccgcgtactgagtaaccaacgtgccatttctatgcaggaaacccgcataaccaaactggaagatgactgggcgctttccgaagtaggacaactgacagaagaggtaaaagaacttcgtgctgaaatgggtgattctggtcttgccacaacccgttcaatctatgcgcgaattaagatccttgaggatggttctgttgtaatgcaaaatgaacttgatgcgattaatagttatatcggtcgcacgtcaggttcaaccagttccattaacgatcgtgtgaacagtatggaaaactccgttagttctctggctacacaaatcaacgatccggtaactggtatcactgcacaaattacaaccatcaatggtcaaattggtacggtttctgttcagggtagtatccgttatgatattgcggaaaacaaacgcagattgatggatatggaaatgattctgggtgaatccggtgatgaaggattgcagggacaagttgcgatcttaactggtgacattggcgaagattcagatcctaccagtatcaaaggccgtttgagtgttgttgagggtgaattacgcaccaacactagcgcactctgggaactgcaaggcgttgtaggtaactcttctagtggcctcgttgcaactagccagcaggttaacaaagaaatctatggtgatggtgttagtgccgatcctgttactcgcgctggtttgaaaacgacaacccgcaacctgttcactcaggtaggagataactccgaaggtaacgaaacgggcatttatgcactgattgccgaccttactaaacgtgttgaggatttagaagcgttgaacattgcacaggcacttgcagatcgcgtaactatcgaagatctgaatgctaaactggctctgtacatcaaagaagctgacgccgatctccgttatgagagcaaaaacccgcctctgtcattcggtactaacctaactggtgatactgaatacactactggcgatccattgtctctaagcgtaactatgaatggtggtgtttctccgctgtcttaccagtggacgaaaaacggcgtaaacgttggtactgatgctaacacatttaccatcgattcgctacagccttctgattccggaacttacaaagtaacggtaactgatgcaagccataaagtcatcgtttctgatgaactggcgatcactgtcgcttaacgattaacaaggggcttcggccccttttgaggatctttatgattacgaacaacccagcacaattaaaagatgaaattctgcgccgtttaggtgctccgatcgtcaaaatcgaagtgacaaccgaacaggtttatgactgcattcaacgagcattagacctatatgcagaatatcattacaatggatctaacaaagggtatatcattctcaccctggggccggacaacccgaaaaatattttcgatctgagtaaagaacacattttcgcaattactaaagtgttgcgtactaacatgggttcccttgtatcgatggatggtactgcggtttatccgtggtttactgatttcctgatgggccttactggtggttctctgggcgggggtggttgtgcatcacgtacctacggaatgaacgcatacggcgcggatatgggctattttacccagatgatgagctatcagcggtcaatgcaagatctcctgtctccgcttcctgattactggtataacgacgacacaggacagtttgcagtatacggaaccgttaaagatggtgatattgttgttatcgaagcaatgatcagatcctttgttgatgtacccagtatggtcggtaacgtctctggatacgctacagcgggttctgatggtgaagataagtcaactatagcagatatatacaataacccctacaaagccgtctcaggcggcgtgaaggctggtcaaggtacaagcgttcagagttcatcctctgcgtataacaaccgttgggtgaaagattacgcaactgctcttgttaaagaggtaaacggtcaggtgctggctaagtttcagggtatgcaattgcctggtggtgttgctccggatggaacccgactgattcaggaagctatgcaagaaaaagaaaacctccgtcaagaacttctgttactgtctgatgcacttccagtgttgatgatgtaaggaggaaaaatgcactatagattgtatcttgttgtttttgaaacttctactggattaaaaatttatggggggaagcgtcattccccttatgataatccacataatgacccatatacaggatcagggacatatataaagagagctattaaaaagtatagccattcttgtattaaatgcattcgatggtctaaagaatttcccaacagagaattactagcagaagcagaagaattattagttgatgagataatggattattattccagttgtgctaatctagtacggggaggaaaaggcggagtttctttttatgatccatcaaaaaacccaaatataggttcaaaacgaagtaaagaatctagagataaaatgtctatgattgccaaaaatagaaaatatagcgaaattggccttaaaaatagacaagaagccacccgtataatgacaagaaatagaaaacaccatgatgtttctggtgataaaaatcccgctgcaagaaaagttatcgttgatggcgttgaatacccaacattgaaagaatgcggagaccactacggcataacaaaaaattctgtatttcacagaataaactctaagaaatgggagggatggaactatgcgtgattgggatgaaaacttatttgcacaactggaatctggggaaggtgtagacaataacctaaaaacagaagttactaataagtatgttaactggtacaagtataaccctactcaacagttacatgattcactaacagccgaagcaattcaaatgaaatctccggatatgtattacgtccgtcgagaatttgttaatattgataaaattttgggcgaagaccgtgaatcgaagtttacaaaatcgtggaaaattgcagcatacatcgattcgtatgcaaactacgaaggacagagagacttttacagcaaatttggtatgatgtcaaacgatgaaatgacacttgtgatcaatcctcgtttatttgcacatcaaaccgatggcgggatccctgttctgggagatttgatttatttccctatggataacagcctgtttgaaattacatggattgagtttgacccgttcttccagttcggcgatcgtcctcaacgtaaaatcaacctcgttaaatttatctatactggtgaagaattggatcctaaactgcaacgaaatgaagggattaaccttgctcccgatgctgatctggatctcgaacctattcgaaatcttgatggattggctgataccaatattgaacaatacgaagaagatcaagcctttgaagatgaaggcgatgaattcattgaatcgtttgatgttgtcaacgggcgcggatcgccgttcgcacagttcccataaatataaccaggggaaaccctatacatgtaagggtataggagaaatcttatacccgctttaacccatacaggaaaaataaaatgtttggattttggtataatagttcgttgcgaaattatattgtcttgatgggttgtcttttcaatcacgtgcaagttaaacgcgttcgcggcgaacaagaaaaatttatcaaggttccgattacctacgcatcaaaagaaaaattcctggcatccatgaacaagctgaactatgcatacagtcaggaaaatgttgctaaaacggaaacaattttaccacgtatgaatctatccctcgttgatttgcagtataacgcaattcggaaaacggggatcgcggtaaaccaaaaaatgacgcagttacgcgcacctggaaaaacagtaacgcagtttaaccctgctccgtatcgtctcatgttcgaactgggagtgtatacccgttacgaagatgatgtgtttcagatcatagaacagatactgccatacttccagccgcatttcaactgtcgtattacagaattacataaaaacgacattaaaatagaccgagatattaaaatatctctgcaatctgtttcccctgataccacgtttgaaggtgatacaacgacacggcgacacattgaatggtctttaatgtttgaattacagggctacctgtatccgcctgttaacgagattaaaggcgagatcagaacagtatacacggatttcttttccaatatgaacccgttggacaaagacaattttgaatccgttgatgctcaggtggatccggttgatatgcctatacaggattacacgggagaagaatacgttcaaacgtatgctaatgatatcccaattcctagcggtgatcaacctcctaaaccgaggggccaataatggaagaatttagcgtaaaacaactacttgatcttgaaaatctccctggtgctgaaactggggaagaaatggttgtgtatgaaaaactcgaactcgttgatgtcgagtcacacccagcagatcgaaaacctgatttagaggaagactatgcacttgcgcgtaaaaccgcgcattacatgaatcagatgatcatggatatggcacaaattgccttgcataacgctaaaaactctgaatctccgagacacgttgaagtttttacaaccctgatgaatcagttaaacaattctaaccagggattgatgaaaattcataaagaaatgcgagaaattaccgaagaaacaacaaaaccaggatctgaaaaaggtaatggcggcggtaatgaaatgaacatagagaatgcaactgtatttgttggttcccctacggaattaatgcagaaatatggtagtgcatacgaacccaaagaaggcttcattaatggtgaagcggtagaggtaaaccctgatggaaatggaaccgacgatcgatccgagtaaggaatcagatcacccaatcggattaatgcatcccgattatctgaaaaagaaaattgatgaatttgggatggagtggacgcaaagcgaacatgataaaaaatggtatccgacaaagtttagcgattacctaaaaattaacggtatccataaagttgatattcaagcaaaagacagttcaaactttgcgacgtataaaaacaaaggaaacaagaaaactcgatataacggaaacccaaacctgaaacgcgcgtacatccaaacgaaatggacgcaacagatgttgatggagtgggttaaatgtcgtgatgatattgtttattttgctgaaacatattgcgcgatcacccacattgactatggtacaattaaggttcagttgcgtgactatcagcgcgaaatgctgatcgaaatgcataaaaaccgtatggttgcctgtaacctgtctcgccagttgggtaaaacaaccgttgttgctatcttccttgcacactttgtgtgtttcaacgaggataaatatgttggcgttttggctcataaagcctctatgtctgcggaagttctggatcgtacaaaacaggcgattgaacttctccccgatttcttgcaacctggtatcgttgaatggaacaaaggttctattgaacttgataacaaatgtaaaattggtgcgtttgcatcttctcccgatgcggtacgtggtaactccttcgcaatgatctacattgacgaatgtgcgtttattccaaactttattgatgcgtggttagcgattcagccagtaatttcttctggtcgtaaatcgaaaatccttatcacaacgacacctaacgggcttaaccacttctatgatatctggaacgctgctatagaaggaaaatccggcttcgtgccatacacggcgatctggacatcggttaaagagcgtttgtatacagacggtgatgatggcgtatttgatgacggctattcatggtcttcgaagatgatcgccagttcaagtaaagaagcatttttacaggaacactgtgctgaattcatgggaaccaacggaaccctgatcgctggctggaaattgtctaaactatcatgggttgatactgatgaaacggaaactaatttctatcagtataaagctccagtagagggacataaatatattgcggtactcgacccagccgaagggcgcggtcaagactatcacgcgatgcatattatagatattacatctatgccgtttgaacaggttgctgtatatcattcaaacaaaacatcgcaccttattttgcctgatgtcctgttacgttatcttatgatgtacaacgaagcatgggtttatatcgagctaaatagcacaggccactcagtggctaaatctttgttttctgagttggattacgataacgttatttgtgatagctataatgatttggggatgaaacaaagtaaacgatcgaaagcgattggatgctcaaccctaaaagacttgatagagaaagataaactcatcataaataacaaaaagacaatacttgaatttcgtactttctcagaaaaaggtgtttcgtgggctgcggaagaaggtttccatgacgatctcgttatggcgctggtttgctttgcatggctaacaacacaaatgaaattcgcagaattttgcgagaaagacgatttgcggttggcaaatgaggtattcgcacgtgagcgcgaactgctttatgaagatatgttatgtcctgttatcgtaacgagtggcgacgaaacaatatctgtcggccaacacggtatttcgtttatataaatttagaggaaacttaataatggctttaatctctccaggcattgaaactaaagaaacatcggtacaatctaccgttgttcgaaattcaactggtcgtgctgctattgttggtaaattttcatgggggccagcttaccagatccgtcagatttctaacgaagtcgaactggtaaactattttggctccccagacaatgacaccgctgattatttcatgaacgctgtaaactttttacagttcggtcaggatctgcgtgttgttcgtgtcgtcgataaagaagccgcaaaaaacgcaaccgcgatctataatcagatcaaaaccacgatcaccgctgctggttctaactatgcagtagacgatcagatcaaagttaaacacaataacgttgttattgaagaagatggtgttgttaccagcgttgatgatcagggtaaaatcctgtctgtgttcattccgagcactaagatcatcgcacacgctaaacaggttggtgtatatccggatctgtctagtggctggactacagaaatcgtttccagttcttctggtgtttctgctacgattacaatcgatggcgtagaagttgatccgggtattactctgctcaaccttgacaccgcaaaagaaactattcaggcaactgctttccaggaactttgcaccaaataccagctaccgtctgttattgcaatttatcctggcgaaatgggtagcaccgtaacggttgaaattctgtctaaagctgcatacgattcttcggctgtcattaagtcttatccttctggtaagtctggtaaaaacagcggtcgcagttcgatgaactttggccctcagaatgataaccaatacgcgtttatcgttcgccgtggtggtattatccaagaaacgtttatcgtgtcaaccgctaagggtgataaagatatctacggttcaacgatctacatggatgatttctttgcaaacggtggttcgcagtatctgtatggtacgtccctaaactggcctgtcggattctccggcgttctggaactgggcggcggtacttctgcaaacgccactgtaggcgctgatgaactcatggctggttgggatatgttcgcagatcgtgaatctctgcatgttcctctgctgattgcgggtgcttgtgctggcgaaactgccgaaatttcgtctactgtacagaaacacgctgtgtctatcggtgaaacccgttcagattgcgtcgtattcgtttctccgccgcgttctgctctggttaatatcccactggctcaggccgttgataacctcgtagaatggcgtacaggctacaaaatcggtaatactaccccagttgataacaacatgaacgtaagttcaagttatgcgttcatcgacggtaactataagttccagtatgataaatacaacgatgttaaccgttggatcccgctcgcgggtgatatggctggcctctgtgtttataccgatcaggtatcgcaaccgtggatgtctccggctggctacaaccgtggtcaactgcgtaactgcatcaaactggctatcgaaccgactaacgcgcatcgcgattctatgtaccaggtacagattaacgcggttactggtttctctggtggtgctggatacattctgtacggtgataaaaccgcaacgactgttccaagcccgtttgaccgtatcaacgttcgtcgcttgttcaacatgatcaagaaagacattggcgataacgcaaaatataaactgtttgagaataacgatgatttcactcgttcttccttccgtatggatgcaggacagtatatgtctaacgttcgcgctctgggcggtgtatacgattaccgtgtggtttgtgacactacgaacaacacgccggatgttattgatcgcaatgagtttattgcatcaatctacgtcaaaccagcacgttctatcaactacatcacactgaacttcgtagcaacctcaactggtgcggatttcgatgagttgattggttcaacgtcagtataacatgtaaggggctgaaaagcccctataaatacacatagaggttagaaaatgcttactgatattgtacgcgcctttgaatccggtgatttcgcacgtccgaacctgttcgaagtagagatcccgtacctgggcaaaaactttaaattaaaatgtaaagccgctactatgccagcgtctaccgttgaaaaagttccggtaggttacatgaaccgcaaaattaacgttgctggtgaccgtacctatgatgactggacaatcacggtatataacgacgatgcacacacaacccgtgatgcaatcgtagcatggtcaaacatgctgcatggtatgggtgaagacattacaggggatatccctgcaaactacaaaaaaaccgctacggttaaacagaaaaaccgtaacgacgaagtaaccgccgaacataccatttatggcctgttcccgaccaacgtgggagaggttactttagactgggatagcaacaacgaagtgagcacttttgagtgtactttcgcgctagactggtgggtttaaacgctataaatacaggggtagcaataccccttatcattatttttcggagttgtaaatgaacttttttggattagacaatgtgttagggtttttcaaaaatttcgccaaacaggatgaaatggaatttgaagcccaattaaaagatgatacaggttcgattgcgcctccgaaaaataacgatggggcgcacgaaatcgaaacggacttatcaaaccagcgttattcttctgtgttccaacagttctattccggacaggatccgcgaattcagaacaaaacacagctaataaatacataccgtggtatcatgacatacccggaagtggaaaacgctgtttctgaaatcattaacgaagctattgttaatgaacaaggaaaagatattgttacgatggatcttactaaaacgaattttagtaaaaatatccaagataagatcatggaagaactagataccgtaatgaatattcacgatttcgataaccgaggctctcgtttattccgtgattggtatgttgattcgcgtatctatttccataaaatcatgcacaaaaatgaagctgacggcatcaaagaattgcgccagttagatccccgttgcatggaactgatccgagaatcggttacagaaaccctacccggtggggttaaaattttccgtggctatcgtgaatacttcgtatacactgcaccgaaaaacggttatagctacaacggacagatttatagtcacaatgacaaggtaaaaattcctcgctctgcgattgtttacgctcatagcggccttgaagattgcgacaacaacattataggctacctgcaccgcgcggtcaagccagctaaccagttgcgtttgttggaagatgctatggtgatttaccgtattacccgtgcgcctgaacgtcgtgtgttctatatcgacgtaggtcagatgggtggccctaaagctacacagtacgtaaataacattgcacagggcttaaaaaaccgtgttgtatatgacgcgagcactggtaaagttaagaatcagcaaaataacctgtcaatgacagaggactattggctgatgcgtcgtgatggtaaagcagttaccgaagtttcaacgcttcctggtggcactgccttctctgatatcgacgatgttaaatggtttaaccgtaagctgtatgaagcgttacgtattccgttaagccgtatgcctcgcgatgatggcggtatccagttgggtaacgatggcggtattacccgcgacgaattgaactttagcaaatttattcgcgaattgcaaattcaattcaaccctgttcttgcggatccgttaaaaactaacttgatcgcgaagaaaatcattacagaagatgaatgggatgaaaacgtaagtaagattgcttttgtatatcagcaagattcttactattccgaaatcaaagatattgagattttggaacgccgtttaaacctgatgggccaacttgaaggggtggtcggcaaatatatctcccataaatacgtaatgaaagaagttctccggatgtctgatgaggaaattcaaagcgaagccaaacagatagaagaagaatcaaaagaagaacgttttaaaaatccagaagcggaagaggaaaacttttgatgaaagaatttatcgaagcaatcaaaagcggtaatctggtggaagctaaaaaaactttttactccatcatggaagaccgcacagaagcgcttcgtcacgaattacgcgttgaacttgccgaagctgtacgcatcgaaggcgaagaagacaaagaaaaagacgacgaaggcgctgataaagatgacgaaaagggcgataaaaagccagccgaggatgataaatccgataaagatgatgagtgaggtgtgtaatgcaacttgacatcgaaatcaccgccgaagatctccatgaacatttagacgaagcgaaagctcgtgtagatattctgggtatcgatgaaggcacggttaaaatcatcgaaaatttggcggtcaccgaaccaaatttagcccttgctatgatggcggttgttgaaggtttaacacttgatgaggtaattgtcaagcatgttgattcccgtggcaacgtagaacgcctcaaagacaggaaaacccgtgagcgtaatgcgtatcagacgaccggattaactaaatcccaacgtcgccagatcgcgcgtcgtgctctcaaaacaaaacgtgctaacccgtcaattgctactcgcgcacaacgtaagcgcaagaaagcattgcgtaaacgtgctgcactggggctataaatatgaatgaatcccaaatcaacgaaaacggcgatatgcttttaatcgaagaatggggtttaccttgcggtgacgtttcagaatctattttagaatctgttggggaatcaaaagacggtaaattacggatcgaaggtattttccttcaagccgaaaaggttaaccgtaaccgtcgtttgtatcctaaaaacgtacttgaagaagcagttaacgattatattagaactcaagttaacacccgtcaagcattaggtgaaatgaatcaccctccgcgcccgaatgtggatccgcgaaatgcttgcatcctgattgaaaaattgtggtggaagggtaacgatgtttggggccgcgctgttgttgttgaaggcgacggtggtgatggtgacaaactggcggcgttgattcgtgctggttgggttcctggtgtttcttcccgtggattaggtaagctctccgattccggcaaaggctacggcgttgtacaaaagggctttaaattagctgtaggcgttgatgtcgtctgggggccaagcgcacctgatgcatatgttaagcctatagtggaaaatcagcaaagcaaaccgcttgttgagaataatagtgctgatgacgcttttcgggaattgtccgagcgtttgaaaggtctataaatacattaaacaaaacaacaggaaaatcaaaaatgcttaaagaacaactgctggcggaagcccagaacctggatactccggtcgagttagacagcattttcgaatcagttgaactttctgatgacgtgaaagcgacattcaccactgtattcgaacaagctgtaaaagctggcgctgcaaaactcgctgaatcccacattacccagatcgcggaacgttccgacgaactggtcgaagctcaggtaactgaacgtgccgctgaaatcgaaactaagctgtacgaagatgctgataaatattttgcgcacatttccgaagaatggctgaaagaaaacaaagaagccgtttcccgtgacatcaaagccgatctgtttgaatccctgatcatgggcctcaaagaagttctggttgaacataacgttgtcattccggaagaacaggttgatgtagtcgccgaactggaagacgaactgactgagaatcagcaggaagttaaaaccctgtttgaagcgaatcaggaactgaccaaagaaatttcagaaatgaaacgcaatgcagtagtttcagagaaaactaaaggtttgaccgaatctcaggtcgaaaaagtagaatctctgattgaagggctggaatattccgcaaccttcgaaaataaactcagcgcaattgttgaaatggtagcaaccaaagctgaaaaacccgttgacgagtctgtaaatactccgcaaacgaaagatgactttgttccggtagttgaaagtgttccggcagagaaatccaagatcaataaatatgtacaagcggcaaaagccctttcttaatttcaaaaggtaagaaacaatgtctaagaaaaacgaattgatggaaaaatggaacgatcttctggagtctcaggaaggcttaccggatatcgctaccaaatccaaaaaacaactgattgctgccattatggaagcacaggaaaaagacgcagaagttgatccggtttaccgcgacgagaaaatcgttgaatccttcggtggtttcctggcggaagctgaaattgctggtgaccacggttacgacgcaaccaaaatcgcttctggtaactcaagcggtgctatcaccaacatcggccctgctgtaatcggtatggttcgccgtgcgattcctaacctgattgcgttcgatatctgcggtgttcagcctatgactggccctactggtcaggtgttcgctctccgcgcagtgtacggcaaagatccgctggcttccggtgctaaagaagcattccatccgatgttctccccggatagcatgtactccggtcagggcgcggctccgagcaacggctttaccgaactggcttccggtactgctatcgctgacggcgctatcgtgttccacgatttctctgaaactggtcgtgtgttcctccagaacgtttctggctctccggttactgtaactggttctaccgccgatgctctggatgctgctgttatcgccgaacaggaaaaaggtactctggctgaaatttcttacggtatggctaccagtgtagcagaactgcaagaacagttcaacggttctactggcaacccgtggaacgaaatgggcttccgtatcgataagcaggttatcgaagcacgtagccgccaactgaaagcacagtactctgtagaactggctcaggatctccgcgctgttcacggtatggacgctgacgccgaactgtctgctattctggcaaccgaaatcatgctggaaatcaaccgcgaaatcgttgacatgatcaactataccgcacaggttggtaaaactggtttcactcagaccgttggctctaaagctggtgcgtttgacttccaggatccgattgatgttcgtggcgctcgttgggctggtgaaagctacaaagctctgctgattcagatcgacaaagaagcaaacgaaatcgcacgtcaaactggtcgtggtgctggtaacttcatcatcgcttcccgtaacgtggtttccgctctggctcgtatcgatagcggtatcactccggcaggtcaaggtctccagaagactctgaacgttgacaccactaaagcagtattcgctggtgttctgggtggcgtgtataaagtatacatcgaccagtatgcacgtggtgattacttcaccgtgggttacaaaggcgataacgaaatggatgctggtatctactacgctccgtatgttgcgctgaccccgctgcgtggttctgatccgaagaacttccagccagtaatgggcttcaaaactcgttacggtgtaggtatcaacccgtttgcgaactctcgctctcaggctccgtccgaccgtatcacttctggtatgattaccaaagaaatgttcggtaaaaacgcatacttccgcaaggtttatgtgaagggactttgatcctaattcgttgaaaaacaacgactttttaaagggaaccttcgggttccctttttgtttatataaatattgaaaacattcgaggctatattatgaaacatatcatttataagataacaaacacaatcaataacaaaatatatgttggtgctcactcaaccgaagatatcaacgattcatacatgggttccggtattgcaatcaaaaaagcgcaaaagaaatacggtatgaaacatttcataaaagaaatacttcatgtatttgatacccgtgaagaaatgtatgagaaggagagggaaatagttgatattgaattcataaatcgaccagatacgtataatgctggtattggcggtaaaggtgctccaatggcgttgattggatggagtgatgaacaacgcaagctgatttctgaaaatacttcgaaagttatgcaatctccagaaatgcgcgaacgtctttcaaaaatcaaaaagggaagaaagcaatcccaagaatccaacaggaagcgctcagagacgttaaaagctaaatacgtgaatggacgtacagacagagagtataaacctctcacagaggctcacagaaagaaaataagcaagcaggtttctatagatgggattttatatccttctgtaacggatgcggctaaatctcttagtatgtcccactctggtttaaaatatcggattaatagcgacaaataccctacctggaaatttgttgcataaataccattatacactttacgcaggaacataaaatgagtgaaaaattttacacaattaacaagctggtgcgtcagtcacagctaccgcctggcctgtctaaaaaggttcttgatgaggcaaccggaacagaaacaattaacgtagctaatacccgtccggatctggtatctcttacccgtgcggtaaacaacctgatctacggtgaacttgtagcgattcaggaaactaatttacctaccgcaactctgttcggtgtgcgttatcgtaaccctaaaggcgatatgacgttttccagcgctgctacatattccggtaagtatgcaagccgcgataatatttcaaatggtgcggttggtactgcctacaccaaaggccaagttttcaaacacccgacaagtgatgttgtatacgaagtaactgatagcgtaactctcgcaggtgctgatattaatgaagcgattatggtcgcattattcagcaataaattacgcctggcaagcgaagccgcgccaacaagtcagtatgaaaccagcgaagatattagtacaacttctttcgaaatggatcgttggaatatcaacgttcgttcccgtaaattcaaaactgaaatgaccgtggaacttatgcaggatctggaagcaaaccaattcaacgcagaaaatgtgattgaagatgttttgggtactgttgccagtgaagaagtaaacaaagatatcattcagactctgatcaacgtatcaaatcgttacaacgttgatggtgtgatcacaaacggcattttcgatgctacaaccgcatacactgcaaaggatgctccggctttaggtcgtttcttgtatcaattagtgtgtgaaatggggcaggaaatgaatagaacgacttcatttgaagctacctatgtcctggcctcttctcgcgttgtaagcgttctgtctgcgtctggttggatgcatgaaactgatgaaacccacccgttagcaacaggtcgacttaaaaacggttactatgtctatactgacaccaatacaccgtttgattacctgctgactggttgcaagtacgatctgggtgaaatggatcatgttggctctctgttctatacgccatacacagaagctgatcaggcaggttcgatcaagatttctgttgatcctcaatccttacagcctaaagttgctattctgatgcgctacggtttatcggttaacccgtataccactgctgctaatgaaagacttgtgaaaggtgatgactgggtaaacctctcaggtaaatctaagatgagtcagattgtgggtatcaaacttcctaaactgggttgatagtattataacccaacggggataatattcaataggtggagtagggaaacttactccatcttttaataattataattaatattaaattagatcttgaatttataaatgatttatgataaaatttattaattataattattatagatcaaataatttttgaaatcaagtaaaaataaatttgattttataaattagatcatgtataattattcttttaataatatattatattagatcaatttaaatttgactacaaattaatatagtatattatagatcaactgggtaaattggtgagtatgttatgagtttgaaattagaagatctgcaaaatgaacttgaaaaggatatgctgatagatcccctcaagttgcaatcagaatcagcggatatccctaagatttgggctaaatggcttcgttaccattcaaacgcgaagaaaaaactgatccaacttcatgctaaaaaagaagctgatgtgaaggatcgtatgttgtactacaccggaagacatgacaaagaaatgtgcgaagtggtgtatactgggactactgaaatcaaaatcgcgatcgctggggatccgaagattgtagaaaccaacaagctgatccagtattatgacatggtggtagatttcaccagcaaagcactggatatcgtcaaaaacaaaggatactctatcaaaaacatgttagagatccgtaaattagaaagtggtgcataatgtctactgaaaatgaaaaatgtgtagtgtgcaagtgtccggttccttctactggttttgtgactgaatccgggcgcgtgtgtagtactatctgtgctgactacatcgcagaaaaaacaaaaaacggcgagatcaacgaatccgatgatctgaatgaagttcaaatgttgctgtaggaggatcttatgattggatacggtgaaggaattacagatcgtgatgaacatcctgatttttagtgcataaatactagcgtacccgaaaggggcttgataaaagaatgctggatgataggcgtactcttttgcgccgtccgatggagtttaccttcggcggggtgattgataatataccttcgatcaagggcatgtgaatagaatagccagaatagtacagcactggcgttaagcaaatgtacaaaagccccttcctttcggttggggctttttttagaacttttcttcttctccgctttcgagttcggcctttaattcttcggctcgacctttcagcgcatcgcgcatagaaatatcgtctgacggcgcaacatcaacttcttttacacgatttttgtaatatttttcaagctctttaaggccgtccatagtacggcaagaggcgaccttgctcatgaaatcatcaatagccgcctcataaagtcgaaaatcgttgaaactcttcattttgacctctaaatttcgatttgtttgatcacgtagtcaaacttttcttcattgtaaatgcgtactcgttcgattgcgtgtttcataccatagtttttgtatgaatatttatttttagcatttttggactttgccagcgttgctaagttatcaaccaaatcccaaacagtagcaagagatttagaatcatgtttacgcagtacgcgcccaattgactgtttgactataacagcagatttgcaaggatgtccgaagatgatgtgatgcaggttcttgacagaaatacctgtactcagtacaccaatagaaccgattacgatcagccccttcgttgattccgcgatccgtttcatttcgtttcgctcatcaatccccgtttccccagaaatgtatacaacgttgtcatatacctttttgagttgctcatacagccatttaccatgtttgatctgattgaacatcacaaacacgttttcatctttttcccttgccagtttcaacgccagcttacagatccatgcgttacgcctggtatgcgatgttatatacttgatttcgctttggtaatcggcccccttcattttcttaatctcatcctctttatatctcatgaagatggtattaattcgaaggttggtaacttgaccttcctgcatcaaccgatttgtatcaactggcttgaagatttgaccaaaagcgccaatgtattgcatcatgtttgctttgccttctttcagagaaccagaaaggccaaacttgaaaatacactgatccattgtgttgatgatcttctgtatgctttgtccggttgatttgtggcattcatccaccatcaaacacatgaactgctgaaaccactcaggaggcattttaacagccgattgccacgtagacacgtagatcaatgcattactgtttttagcagttcctgaacgtattccaagcattgcctcgcgaggtaaaaggcgatagttgacaatatcaccgatcatctgatcaacaagggcagttgttgggacaatgattagtactttgcctgtgtaattttccagacaccaacgagatatcaatccctgaataagagatttacccgctgacgttgggaggttaagcacagcacggcggtttttaatcgcatgaaacaccgattgtttttgataccaatacggatcaatttgcttgtttccgtcgtatactgggtgttcttctaaccacttgtcaaaatctggctgggtaatttcttctgtttcgtggatcttaggatccatccagatagaatacccgcgagactccgcgaattttgttacaagataggctaaaccgtagggcagtttcccgttatagtccatcaagtatatgtagccgttccatccaccatatttgtattttgcctggtactgataacctggcggctggaagctgaaatagtcgcgcaattcatagactatgttagcctctgcctgaatctgcacatgactagtgttaaggaatttgacttcgatatccactatgtgtatcctatatacggtttatatgaatatttataggctaaataatgataaacattggagaactacaatgagtattgattacgaaaaggttgaaggtttcaaagccttagaacaaaaagaagccaaattacagcttgctacctacgcgcaagaaacgtttgatgtcaaactgaaccgtcagaagtcattcgaaaatatgcttgctgatctggaagctgccgtaccggaagaaaacccggaactgttgatcgactcccctgatccggaaattgttacatacgaaggtgaaccatctgttcctgatgttgctccggaaatcgcagaccagattgaaattgttcctgacgctctacaagctcctacaagcgattctgagacggtttctgatgaactggcatggatggaagggtttaccccgtctatcatcatgatgggccgctctgtttcgaatgctggcttttatacgtgtccgtattggatctatgattggatgaaacaaaatccggattggtataagcaccctgatggttgtcctcattattcagcgcgtcaaaccctcaagtcactggcatggtacatgcaccgtgatgggatggttactgtacgcgaaaccagaaatagccagttcgacacgttcaaaaaataattttaaaaagtagttgaccttaccctgctgttcgagtatattgtattcgaaggcgggggaatggctctcgcagtgaagaaggaaatacaaaatgaacatgatgaaaaatgcttactacccagttctgtttgtttggactaatggtgaagttaagaaaatcgtcaattctaaagctccttattacactgtaggtgaagcacttcgccacgctgcggaagcaaattatcctgttcatgccgaacctggttatgctcgttggaacggttctaaatgggttgctgatacctgggacaactacgaagaagaaagaatggagtgtgatcctgattacgtatctcgtcaaatggaagctcatatgattgcagatcgtagactggataatgaagctcgcggattctattgattaacaaggggctacggccccttttcttttaggtgaaatatgaacttaaatcacgaatgtttaaaagatttgagcgatggtaacgagattggtaacgttatttttcttgatatcgatggcgttctaaataatatgcggtgcatgaaatttggtgaacatatggacatcgaatgcgcacgacacttacgccggatagtgaatcacgctaattgtgatatcgtcatttcctctacgtggagaatcggcaacagtacccataatctacgtgaaatattttatccgtggggattgtatcggatcattggtaaaacttgcactaacttccctcatagcactggaatgcgtggtgatgaaatcaaggcatggatcgatactttcggatgtaaaaactatctcattcttgatgatgataccgatatgctttcttcacaaaaagaacattttattaaaactgatgggtttgttgggttgaccgaagaacaatccacttatgcgatccgtaacattttcggggttactactccgttttgtcctgaatgcaatgggtatggacgtgttaacggctacgacaaatgcggaacgtgtaacggtaaaatactccggctataaataccaataaacataagaggttaaatttatggcaattccttctgtaacaattagcgccaacaaaaacgaacttttgattggcgaaactttgaccttagaggttgaaactactgaactagatccgggtgatgtgtttctggcctatcgttggcaaaaagatggtgtagatattccaggcgcaaccgccgatacttacacaactacggttgacggtacaactgctggtgattataccctgatcttaaaacacggtgctgatgaagaatcagcaacagaaaccacgtcagatacaatcaccgtgaccacttattctgatgatctcgtttctaaatggacggttcacccgattccgtggcgtgataccagctttaccccgatcggttattgggtacttgatgaaattctgtatcagaaagcacagggtaaagattggaaaactgattatgctgattacaagtatagtgaggaagtacaaacgatcctgaaagcgttcatggaaaacggtgaatgtgagatccaggattcacgaaacggctatattcataaaatgagtgaaatctaagaggctttaaatggcaactgaaaaatggactacggttcatcctattccgtggagaaataccagttttacatatcttccatactggctatacgatattatcgttgatgcttttgagaaaggcgacgactggcgcgattatgcggaagaaaaatataaattagagtttgatactctgaaagaggcgtttgaatattatggtgatattcatgtaatcgaatctcgtaatggtaaactggttagtctgttgtcattgactcctgctcctgaaccagatcctgaccaataaaataaggcaaacaatgaatacacttctttttgatttcgacgacactttagcagaattttctcagactttttatgataagttcggtgtacgtccggaaggaacgccaaaggaacgatatgatgaaatggcggcttctttggtgcgtactgatttttataaaaaccttccccgtattcaggctgggattgacctccttcaatggagtttccaacgccgaatcggtgatcctgctactttgctgcttcgcgcggaagcggtcagccctctttgggttatgaaagaaaaactgaactatacagataagatttgcgctgaactggggatccctcgtctcgattttagtcgcattgactatccggaacagttcgcagaacatgcctatcgtggtgttctgatttcccgcaaccagaaacatcttgaaatctggaacaattctcatctagctaataaagttcctggtattttccttgcggaaaccctggaagaaaatattcagctagtcacggaagcgcttgcaaaggctaatcaataacaaaaaagggaaccgcaatggttccctttcttttacaatctttttaattcatcaagcgctgttttcttatcaccaacaaagaggatcgctttacctcctgcttttctgaaaggcaacaccgcttttgcccgatcgtcaaacaggattcctttaccagcgaatgctgctttttcatggctacttttaacgtagtggaattctggaacgtaacccaatactttttgcaatgctttacgtttttgttcggcaacaccgtcagaattgaatttaccaacactggttagtattgctacatcaccaagtgttcttaaatgatggaataattcaaatccttctttgattggttccagattttcgtagaaatcagttttggcaatttttgctttgcactttttcaactcatcttctgtcatcatagagggttcgccatacattggcacaaatgaaccttcccagtcgaacaatacaccatccatatcaaagaaaaacttattcatatcaattcctcagtttgtgtatgcatactataatgtttaatcattaatgtcaaccccaagtgtcagttttcggtgcgtatgctgcaactttagccacaatttccttatccagttcagctacagatttctgaggcttaccacgggctttaactttgatgtagtttgacttaacaacaaacatccctttgttacttgatttcttgatctcgctatcaacaccaactttgttaaagctgatccaaatgtcgccgtccatatactgtttaagagaatcacccatgttcaggatcttcgccatagtaagggccgcgccttcgtgggtatccatgagaatttctttaggaactacacgatcgcgtttctggttctgctgcatagcaatatgcacatcgttcataacccatacgatatgtacgttttcttttttgtatcccagcgtttcgacatcacgcgcgatgcttgccagcttgctcatgccttttaacgttacgtcaaagatgaggttaggtttacgatcttctggtgctgccataataccggaataaacacggttttggtttttgttggaaatgttgaaaacgtcggcgatcacatgatggagggtagatacgttttctgggtttttgaggttcattgttttgacatcatgacccgtttgtttcttgatctctgctgcgagtttatcgctacccattacaagttttttcagggcgtcaacgtccagggtaataccttcgatgcctagcagtttttccagtgtgaaccctttacctgaaccagcaccgccagcaagaataacaacctgaccgaacttaggataagcacggcctccgaaggtgatcagcgcttcggttaaggtgctttctgtgaattgtttaaatgacttcatgtaaaattctccagtttattttctattatttattgacatgctttctgacagtggtgtatggttatggtgttcgacggataggccggaagaactttaaaccataaggtatatgatatgaaaatcaatttacatcgcttcattgtagaattttcccgcaaccgtgacatggactcttacaactattactcccgtgagattgaagatctttttgcggctcacgttggattccttcgccaccatacccctaaaatgcgtcctgaccacgatccgatatatagccctattacatggcaagcccctatcgatggttacgttgaagggatccggatcatgacgtttaacgcgatgtatggaaacgcgttgatccatatcgcacgtgagaaaagggccgaattccctaacggatggcgtattgatgaagtgattcaaaaccttatgcagttacgacgtgaatacaaagcgggtatgtgtctgcgtaatgaacagtatcagatgtataaaacgtatgcatatatctctaagcacctaattaattccatgttttacatcgttggtaatcatggttccgctatagatatcggttcttatgaaatcgtggcttatgctcgcgaacaaggaaaggccgctgcactgaaaatcattgagtctggtgctatcattcttaaccatcgcattgatactattgcttactatggtgatcaggttgaggttgaaggcgtacaccatgaacgattcaacaaagccgtatttactaaaaatggttatgcgtatggtaatgacattataacttctgcggttcctttcgttcgtctaactgttgaaggatttggagaaaggttgccttataaaccgtcagaagctcaaatgtgcgcggctgctgaaagaatagccagaaagcggaaaatgtataccgatgaatacctggcgtatgtcaacaaaacaaaagaagatgtagaccgagaaatttcttgcatggatttatccatttgatataatgtaagcatctttttaagggaggatacatgaaaacgatacattgcagaaatgaaaacgttgtttattatcacggttcgtgtactgctgctggtattgaaagcatgttattgcctccctgtgattctgatactctgtctgaaaagggcagaaagaaaaatttagaccgtgttttctttaccgctgatatcgggttagctcgtatatatgctggaagggccgcacgttctataggtggggatcctgttctgtacagggttgtgtgtccggttgatgttgtatgcatgaacgaagacaaaggcgcgagcgtttaccatgcagcatgggcgttttgtgaggaattatgaatgataaagtgttggcgtatctcgttttcttgctgggatatcgcttagaagtgatgggcgcgtattcatcaatgtatggtgatttaacggctatctggatggtcgggttaggggttgcttttacattcctttcctttgcaattgttaatgaatcggaaaaggatattgtatgaaactatatcatgtgatctactctggtgttttaggcattgacaaacaaatgttagttgatgtaatgtgtaaaaaactcgatgaacgaattggaaccagatacaaaaatcatgtatcggaaagtgttttcatcaacgttgaccatccaaatgacatggaagaaatggtcaatactcttgatgatcagcagatcccgtttgttgacaatttcaacatgagcgctggagtgtatacggtagtaacttttgttctaaaaaatgttgacatccgaaacgatagcgtgttgaatgtagttgcaaaaatcgattctaccaaaggaaaataatatgaaaattgtacaccgtagcatttccgaactgtctcaagccgaaaaagtgcaaattcatttcaaattcaatgatttgcgtaaaggttatgccgaaattgcccgtgaacatgggttagataacggcgatatttaccaggtagtacaggaaattgaacgtatccgcgcgttccgttctgcaaatctccctgttaaaaatgcaatgcgccgcgaagcgatcgaaatccatcgtaagcgtgtgtacaatttagaacgtgctaaacgtccgatgaagaaagaaaagaaacctcgcccgtttaaacgcgaacatcttaacacctctatggcgctggcgtttcaagatgcggggattatctgatgcgtaaatctgcgatggatcgttgggctagtattgctacttcaaacgtaaaaccaaatcaagccgctcctgatgtagaagcggttcgtaaagcaaaagaacctgagattgtggcccttagcccgaactcattgagcatcgccgccgtgcgtctgctattgaactggatctgcgtattgcgcgttcatacaatctcaagcatgaacacgccgcaaagaacaaccattcttttgaccttactctggaagattggaaagtattgatgacaactgaacgttgtcagtattcaggcaagatgtttagcaataaacccggtagcccgtatgcccgtacaatggaacgtattaatccacgtctgggatatacacaagaaaatacaatagcggttatcaatgctgctaatgctgaaaaatcaaatctagatgcattcgttaagggtgatgtcattctggatgaagtaaaagtgaagttgctgcgtaaagcactttatcaagtcgaaaaacgtgtgaaaatgaaaggttaaattatgtttaagaaatattcttctcttactaaccattatgaaggtaagttcatcaatggtgtaattatgaacgggcttactggcggtgtgtgggttgcgcgtgaaaagatccacggtgctaactttagttttatcaccgatgacggaattaccgttacccccgcaaagcgtactgatgttgtgaagccagccgaagatttttatggctgttcagcagtagttgcaaagtattcaccagggatccgtaagatgtgggaaaccctcaaaaagaccggaacttatgatgatttggttattcaagtctacggtgaatttgcggggcgcggtgtacagaaagatgttgattacggcgaaaaagatttctacgtattcgatatccgtgtaaatggtgaattccttccggataacctgtgctcgcttatctctcgatctcatggcctgaaaatggccccgctgttgggatacggtacttttgaagagatcaaagaactgccgatcacgtttgaatctgtggtgaataaagcaaatagcggcattggtagcgataacacagtatatggcgaattcgtatatcctatcatggacgttgaagagggcaacattgcagaaggttttgtaatgaaacctgtttcacctgcttttatgccaaacggtgaacgcgttgcaatcaaatgcaaaacaaccaaattcactgagaagaaagcgaagaaagcaacccgctttaatgctccggtttcattgtcagaaaaagacaaaaaccaactcgatgagtttgtttgttaccttacagagaaccgtgtgaaaaacgttctttcgaaactggatctggcttcgatcactgctaaagatttcggtcgcattatgggcttaactgttcaggatgctatcgaagaaatcagccgtaatcacgggcctttcctcgaacagttcgaagacccagcaatggctaagaagctgtttgtaaccgaagcccaaaacatgattcgccctgtatggggcaaaatcctgaaccatgaattttaaactatgaacagtcacggaaactatagaagtatttctgatgaaatagccgcaataagagaactccttcaatacgtttcagttgatattacttctggaaatatcgtatggtcttctccgcgtcaaggtaggagggttggtgattccgctggtactatgaaagatggatattgtgttataaagtttcaaaagaaacaatatcgcagacatcggatcatcttttatgttgctaatgggtatcttcccgctcttgttgaccataagaatggtgttgaatttggtgatggtatagataatttgcaagaggcaacgcaacaagagaacataagaaagcagataaagaaacgaagcaatgcttctggaaaaagaggggttatttttgataaaagaagaaataactatcaagcgcgaatagttgttgatggtaagcagatttttctaggttcatatgataaccctgaaaaggcttatgaagtttacaacgaaaaagcaaaagaattgttcggtaatttttatgtcgaatgattttagtacagtaattaaaactgccaagacagtaacattaattggcagtcgtaaacctcctgaacgtatcgcaaacattgctgttaaaatcggacgtgctttgaacgaacgcgggatcagggcttattctggcggcgctcctggtatggatagtcactttctgtttgactatagtccggataacagatgtataatccttcctgagaacgggtttaacggccttttctcaaacggaaaggatatcatcgactttcgagatttaaacacacagaaagccgctgacgaagccagaaaggtagcaggtaacttcgatacacagaatgaatacgttcaaagaaggtatgcgcgaaacacgattcaagttcttcgtgaaaatcttgacaatccaactgattttgttttattttgggcggaagaacgtgaaggatgtgttaaaggtggaaccgcgatcgctgtaagattggctaggttgtacagggttccatgtttcaatctcttcaaagaaagtgtattgaacgatgtgtgtgatacgttagggatcaatatcaaacccccaacgttggattttttatggtaattgaacatgcgcccttacttcgtgaaacatacgaaagatgggctgttaataacgcaataggtgaaaatatgattcatgtacgtagtatcggtactgacggcgaaactccggtagaaggccgatcccccactctcgcagaacgagcaagagaaattatcaacgatcagaatactaagatgatcgaacatgcgcgggatacaatcacaaaaggtgttctgaaacacgcgacaaaacaaaaccttatctatgatatgaagcacgatatcggctcttgtctgggtattgaatgtactcgctatgcattccaacgagtttctgaatggttggaagaagaagggctaaaattcgatacagaagaaaaacgcaacgccgctaagatcacaaattctctggctagtaagtacaatcaaacgtatcgaaaccaggaagaacgcgaagttttcggtttcaacattcctgaaaggaaaacagatcgccgtgtaagtgaattcactttttacattagttggtaaaaaggtgttgacgggggttggttatagtagtattctaactcccgtagacaagacactaactcagaaggataaacatcatggaaatcgtaatgaaagcaacttatgctggatattgcctggaagcaaaaggtgttgctaacaacggtaaaggcttacgggccaatgttgaagcaatgctggatgaattacatgcaatgtacgaatatgacaacgtagcgggtagcgttcttatccaagcgttggaagttgatggtgttgattgtgctggttggtgggatgcttacattgactacaacgataaccgggtttacctgttgagcaacaaagattatttctaaggaaccactatgagcgatgaagctgaggctttagaagattgggctgattttgatgacgaagaagacggggaatatttctgcgttaaccgtggtgcttataaagaccgtttagaactccgtaaacttttatccggttcctctcaaatatcaggatccaaacgaaaaagtagtaaacaaaaagttcagtatagtgatggttctgtacgtgatgaaactattgttgctgaattccgtggtcgggttatcacaaaagaaagacaaattgatgtaaagaacttgtatgaagtggctaaggctgctaaaataggttctgtgattgtttgccctgtgtgcaaagaaaaacacacaaagacaacgtatcacaaagttttctgttcgaatggcagaaaaaccagtaaggattgtaagtctaaatatcacaatacaatccatcccgaacgactggatcgggtattttaaaataaacctaaaacgtggagtacgtttatgaacaacaaaactttcgaagaactgaacagcatcatcacttccgtagattcctataaggtttctcactggtcgcaatatccaactggctccgaagaggcgctgttttatattgaatctcgtggtggtaaatttgatcaagtagttacggctggctgtaaccgccttgcgcaaatcctatcacgtccggtgactatggaaaacgtggattttgctaatcggttgtacaaaatgcactttgggcgcgaaatcttcaactacaaaggttggaaagaaattgcagaactgggttacatccctcttgaattcagagcgattccggaaggaaccccagtagcggttaaaaatccggttgcaactttccatgctgggaaaaatgcgctgtggttagcaggacacgtagaaaccctggcgatcaggggagtatggttcccttcaaccgtagcaactctatcccgtgaatgtaaaaaagtgttgaagaaatatctcaagaaaacctccgatctcgaaggtgaagcatttgatatggtgttacgtacccgtttgcatgacttcggcgcacgtggaacctcttctgctgaatccgctggtattggtggcctcgcgcacctgtataacttcctcggtactgataccgtagaagcgctgattatggctatctctctgtttgaagattgtcagaaagcgtttgatgatggtgaaatggcggctggtatttcaattcctgctcgcgaacattccactaccgtttcttacggcaaagaaaacgaagaccttgcgtacaaaaacagtattgagatcttcggtgaagggatgtatgcatgtgtgtatgattcctgggattttaaagcggcggttcgccgtatcgcagaatataaagattcgattctttctaagggcggtactctggtagttcgtccggattctggtgatatggtagacaatatcatgtacgctcttgaagaactgggccgtatctttggctatacagtgaactcaaaagggtataaagtactacacccagcagtaaggatcattcaaggcgatgaaattcatggccctgaaacaatcaatcgggtgttgaactggatggagtctaaccgttgggcgtctgaaaacatcgcgtttggtatgggcggtggattgcttcaagaagttacccgcgacactcaaaaatatgcgatgaaaatgtgcgcaatcaaaattaacggtgtgtggactggtgtgtataaatgtccaaaaggcgctgaatggaaaaagagtaaaaaagggttgttgatgactatcactgatggtgttaactttaaaaccattgatactctggaacagaaagtgccggaaggctggaaagatgctatgatcacatactatgtcaacggaaagattacttcccgtgacactttagaggaaattaggaaccgtgccgggatttagtatccgcaaaaacaacaaaggaaccgtgattttctatgacaacattccccttgtagctcgcaaggggctttttgctaaaatcgctgggtattcctttaaactggaagaagtcaacgacgaaacactaaaagagatcgtaagaattgccttacaattaagaggtaagaaagacgaacagaaagctattgacatgatcaataaattgggtgaaactcaatgctttatagtgaatcgtggttacaagtacgataccattgcaaaatttgaaaaagggctttgtgaattatgagttattatggtgtgatcccatacacaggaaacaaacaatcgctattacctgaactattcaagctgttccccgaaagaagttcatacatgcgtttcattgattgtttttgcggtggccttagtgtgtcgctaaacgtccctaaacccgttctaagcaacgattatgataagacgctgattgatatgtatgagcgtcttaaaacgcttcctgacctgtctccggtgcgagaattgattgcatcgaaggggctggggaaagacaagaaagaagagtatctgaaattccgtgatgaatacaaccagaacaaagatcctttatggctctatgtcctgatcctgcattcattcagcaacgttaaccggacaaacgacaaaggcgattttaacgctgctgtaggaaaacgaaccctcaactttatgacagaaaaacgtttcgaacatttcaaaaagaatgtgacaggaattgaatttcgttctggttcatactctgatattgaaatcaacgataacgattttgtttattgcgatcctccgtatctgatcactgatgcggtgtataacaaattctggaacgcagatcacgaacgcgagttatatgctttccttgactccctgcatgagcggggtatcaagtttggtttatcaaacgtgacacatcatgcaggaaagcaaaatgatatcctgatcgagtggatgcaaaaatataatgtgcataacctcgataaaaagtatctgttaggccagcatactgattcttacgaacaaaataaaacgcaagaagtctacgtgtgcaactaccagaaacgcgacgtaaatacataccctgaaacactggatgacttaatgtaaggtaacatatgtttaagatttttggttatatcccttctgtttacaattgcgctccatgcctgaattctaaacgtctcctggacgcaaaacgaaaagaatatgagtttgtttctgtagccgatgaaaaagacgcagacggcaaaccgatcctgaatgaaacggtcatttctgaactcgaaagcctgttaggtactcgtagactgaccatgccccaaattttccacgatggtaagcacatcggcggctttgaccaactgcgtgagtacgttcgcacgttgggataaatattaacacctttatttgattggtgttattatgctcactaaacgtattactaagaaagattatccatccattaaacaagctctttttgaacagcaaaacggcttgtgtgcgttatgtggtcgccctttagagggtgaccttgaaaaacatcaccttgaccatgatcatgctctatctggctctaatgccggacgtgtgcgcggcctcctatgtaacctatgcaacggtacagaaggtattgtgaagcacaaattcaacagatccggtctggtgtcccgtgatgtcgattacatccagtggttagagaacttgcttgcatatctgaaacaagattattccgaaaaccgtattcatgacaaattcataccagataaggtaaaatggttttcaagacttaccaaacctgatatgattgccgaaatggtttctatgggctttgagtacgccgaaaaagacgaacgcaaagccttaaccgcaaaatatagaaagcaattaatgaaggcaacgaaatgaaatatctaaacgctcgattatcaacacaacagaagaaaaagctgatgatgttgatatcctccactgacaaaaagatcatatctctgcatgattggatacttggaaggggtgactctgatttgtgttatgtcaaaccgaaagaccgaacgatgtttgatgatcgcggtcgcacattgactaatttttctcctatcaccgttattgatatgtgggaactccttgagattgtaggacgggatatacctgttgacggggttgaactgatcaaatatcttaacgagattggacacaatttagatattatccataaggcaacgaaatgaaagtagaaaaacgcgacgggaaaaccgttgattttgatgaagaaaaaattcgcaacgctgtgtataaagctggcgggactatgacggatgctgatgccgcaatcatgctggttcagtacaatcagatccgcgatggtagcgcaatgaagatcgcccgtatccaggaactcgttgaagaatccctgatgaaaacgaacccagcggtcgcccgtgcatacatcgaatatcgccacgatcgcgatattgcccgtgagcagaaaagtaaactgttcaaagatatctccggcatggtgaatctgtccaacaaagagatcaccaacgaaaacgcgaacaaagacgcaagggtattcccgacacagcgcgatttgctggcgggtattgtggcgaagcatttcgcccgtaatcatatccttccgaaacacatcgtagaagcgcatgattccggtgacatccattatcacgatctggattacagcccgttcaccccttacactaactgctgtctggttgacctgaaaggtatgcttgagaatggtttcaaaatgggtaacgcggatattgaaccgcctaaatcgatcggtgttgctaccgctctcatggcgcagatcaccgcacagattgcctctcaccagtacggcgggacaacatttgcgaacgtggataaagtgctggctccatacgctcgtatgacgtatgaaaaacatgaaaaggatgcacggaaatacggtatttctggcgatcgtacatacgcgatggaaaagactgaaaaagacgtgtatgacgcgttccagtcttatgaatacgaagttaacaccctgcatactgccaacggacaaaccccgtttgttaccatcactttcggtactggtacgggtatgtttgaacgtatgatccagaaagcgattctgaaaaaccgtattcgcggcctgggtaaagagggtatcactccagtattccctaaactggttatgttcatggaaaaaggaatcaaccttgatccagaggatcgcaactatgacatcaaacaacttgccctggaatgttcttcaaagcgtatgtatccggatattattagcgcggctaataaccgtcgtattactggctctagcattcctgtatctcctatgggttgtcgtagtttccttagcgtgtggaatgatgagcacggtaatgaaattcttgatggacgtaataacctgggcgttgtgacaatcaaccttcctcgtattgcgattgaagccgaagcacaggaagatgaagacgcgcatgatgcattttggcgtatccttgatgaacgtctggaactgtgctttgaagccctgatgactcgtatcgatagcctacgcggtgttaaagccagtgtagccccgatcctttatacagaaggtgcgtttggtgtaaggttgaaacccgatgatgaaattctggaactgttcaaaaatgggcgtagttctatcagtctgggatacatcggattgcatgaaaccctgatgcttttcggatctggacagcacccattcgaccggatcggttctcagaacatgggtagactgatcctggaatatctacgcgctgcgaccgaagcatggaaaaagaaaaccggatttgggtttagtctgtattcaacccctgcggaatctctctgccatcgcttctgtaagctggactttgagaagttcggaagtatcaaggggatcacggataagggctggtatacaaacagtttccatctggacgttgaccgcaaggtaacaccgttcgagaaaatcgactatgaagccgattatcattacattgcaactgctggacatatcagctatgtagaattccctgatatgaaaaacaacctagaagcccttgaaaaagtatgggattatgcaatggataaactggactacttcggaactaaccttccggttgataaatgttttgaatgtggctcggatgatgaatttaagccaacagaagacggttttcattgtacccattgtgggaaccatgatccggaaaaaatgagcgtcacgcgccgtacatgcggctatttgggtgctcctgctgtccgtgggttcaacgaaggtaagaacaaagaaatgatgcatcgcactaagcatcaaaattaatcaaaaagcccttgacttcggttgagggcttttgttatattgggcctatcgaaaaggagacatattatgaaactgactaagaaaatgaccgatgtagtggcatgtgcgtttgcattaggctacaaagttgaaaatcatccaactcgcgttgaagtcatcaaccctatcaagggccgtcctggtttggttctgtgtgaagacggtacagcatatcgtaatgatgtctctttagaactggcaactactatccgcaccgcaaaacaaatgaaagatgttctcattagcggcgcaaaattgagggatttatgatgtattggacaaaagataaatttgtttttcgtgatgatacgtgctttgggactgcataccgaaacttagctattcgtggcggttcgttttcggctaatgatttgtctaaggtagtattccctattaaagttactgagtatgacgtattcggtgttaaaggatttactgattactttggtacaaagtttgaatcagaatcttacatttttactaatagcgatcgtgaattattcaaaaaacacgttgttgttaaagagaaaccgttattaccaaaagaggatgaagcaaaggaaatctatgatctcctgaacatgcttgacaatctcggtacttgtcatctgttcggtaaacgcgcccgtaaagcgaaagatgttctcaacttgttgcgctctcgccggaattacctgatccgggaagctgaacgcaatctgaaaaattcagaaaaacaggctgaaatccataaatccacccttgctaaattaaaggctttgtgatgtttccgttatacgctaaagtgcgtcgaaatgtcgggaattcatatcaggaatggagtgaatggctacgtgaaacaaagtcattctacatttcaaaagcaactgatatgaaaggccgtaacattcgctatcgtaaacccagtggtaaacgagtgaatgggatagattacattgttcttgattcgattcgggatgatatacgataatttaactttgaggcaatattatgattttcaacaaaacaaattcacgtaatttgaactatctacgctgtgaactggaagctaacgaaattgaactgtttttctgtggggctacagatccggaacacaaattgcattgggtatcaggtgagattgtaagcctaaccgaccagattgttgaagaggctacccgtcgcgatgcaatagttaaaattggtgctgttgatgtgaactacgaagggcatccttcatttttcattcaatattatccataaaagtattgacctgtatatctgaatgtagtaacatccttcttgtcaactaaggaggatgttatgaaaatcaaaaacactgctactgaaactctttgcaacgaaattgcagaaatgtactggagtaaaggtcacttagaggctatgaaagagtttcaaaagtggtgtgatacccaaaagttagctaaatgggaatacatcgttattgttgaacggatcaaagaactgatcctcgtgaagaaaggttcattcttgctgtcgcggtgaaataaaaagttataaaggctatacatggagatttgaatgaattatattagaatttataacatggatgtggtcaacggaaaagggatccgtgttgttttgtttgtggctggatgcaatcataagtgtgatgggtgctataatcgcagttcatggaacccttgcaacggaacaccgtacacggaagagacagaaaaccatctgatttctctgttgagtaatccgcatgttgatggacttacattaactggcggcgatccgctttaccgtgacaactatcctactatcctaaaactgcttgagcgcgtttctaaggaacttccaaagaaaaacgtatggttatggacaggatataccctggaggctttacaggccgacccagaacgttctaagctacttccttacattgatgttctaattgatggtaagtatgaaaaagatttaccaactaaaaaaccgtttcgcggttcagataatcaacgtatgatcgaattcgctaaaaattcgatagaaattaaaaatattgcttgacctaatgtgtaactatggtaatcttaccacatcgtaaatgacgattaactttaattgagagataatatcatgatcctgaatttcaaaacccgtaaagaagcacgtaactattgctggaagtggaacattcccctgaaaaccatccgtaatacagggcgcggttcttgcccgtggacagttcaagcaaatgaactgaaaacgttcgtggttggtaaaacttacaaactggttgaccgtgaagggtttactaccaattcacatggcggatctaacatagcaaacactatccaggcgaagcagatcgaaaaattcctgaataacgaggtaaaaattatctcgaaaacccattcagatactttcaaaattgatcatcctcctgaaatgacttatatctctctgcgttcgtgggaagctcgttatttcgtcgaagttggcgcggctccagctaagaaaaagaaagccaaaccgaaaaaagccaacgttacggctccggttgcgcctgttgcaccagcaaccgcagatcttgatcaaatgcttgatggcggttcggcaatgtcggttgaactggatccgactaaatttgttgaaggccgttcgtatgttctggttaaaccgcagcaatttaaaaatcgttgtggcgctaaccctgggatcaaatcatataccgatgaacatagtaatggtatatacaccgtttaccatacgaattcgctcggtcatcatcaattgagcaaaacggtagaaaccattgattccccgaccggaattgttggttactatctgcttgattctgaacgttcgttcttccgtgaactggcaaccggaactgttgatgaacctgttagcgtttccggtaatagcgctatcgctatcaatgtagacgaagcggctaagaaagaagaaatcgcaaaagcaatggcacagcttgaagaagcggttaaagcccatgatgacgcgcttcaaaatctgcgtactgcttccgacctggttcgcaaagctgctcgaaaagtagcagaagtaagcaagtaaattaaactgggtgctccggcacccttttttatgaggtgacacatggaattattagaaggtaaatcttataccctgaacatcgacgctaaagaatttgcagaaaaaacctggcgaaatgctttagctgaattgatcaaaaacaacggctatattacaatcgatcgtattgcgattggggatactgaggacattgcttatgttctgcaagatgatttcgaatatgagatccctagccatatctggaaatacttcaaaccatatgatttaccggaagaagaaccgaagattgctactaaagaagaaatcgccgcgcctgatttaaatttcgtatcttccgatcctaaaatgtggatgactgtaaaacctgttcaacaagatatcaatgatctgcgatttgattatccttttgtcaagcggatcacttcgatttctgtactaccagcgccgacggattcacaggcacttgaatttgcattacagcatgttttcggtgataataagctgtacgcgattgacaaggaagctgctattgatgaacagaaaaaggaaatcatcaaccttctttctctgcatcaacaacttgaagcggtggaattgattgagcgtatgctttctgatacaaagaaagatatcattagcaaaatcactccggcacgaaggaaagcaattgatgaaaatcgagatttacggtattcccgaatcgcttcataaatgttatggttgtattgaagctcggaaattacttgatgagcatggattagaatacgaattttattctgttctaaagccagcaaataacagtgtggggtttgattacgatagaccccgcattgaagagttagcgaaacgtgttcgtagtcgaagcatggcatttacttaccctcggatctttgtagatggtaattttattggcggttatatgcaattgaaagagtatttgggtgaagcatgaataaagaatacattcgcaaagtagcaaacgctattcacgcaacaacgattgattttctggaagggtttgatcatattatccatcctgaaacgctggatagttgggaagccaaactgtttaaaagtatcaatgaacagtttccggaaaaggttaagcgctggtttatcagacaggaaatcgtagcaacgatccttaatgaacgtggtgttgaggcgttcggtgtaacccctctatataaacgaaaccagattacagacgaaacaatcaagaaatataaaaagatggttcggaagtaataaataatcagttaaaatggccttcgggccattttttgtatataaatattggtattgaatacaatataggaaaaaagataatggtagctaaatcattccgcgcacgaagtggccttgatgctgctggtgaaaaagttatcaacgttgggaaggctgatcgtaatacgctgagtgacggcgttaacgttgactttttcaatgaatttaacggaatccagcagtatgacccgacccgtggctattctcaagacatggcgatcatttatgcgcgtcgtatctggtacgcaaaacagaatattgcttcccctgctggggctttcgacgaatccaaatggatcgcaactcgtaatgacccgaaatgggtttatagtaacgtaaccactccagacggtagcattattgaatctggtagttacattatggctgatggacgctttactgaacttctgtacctgctgccggataacccgacagagggcgacgtaatcacgtttaaagattgcggtggtttagtaggtgtgaacagtatccttgttaagtctaacacccgtcagatccgtttacgtactgtacaatcagcacagtatagactgacccacccgtacatgatcgcaacgtttatctataacggtaacgtatggcgtgttgctgaaactctggataaccgcgattctgagatcgtgaacgcaaccggaacaggttcattccagttacaatctggtatgacagttttccgtaacagtgctacgggtaaaatcactctccagttgccgaaatatgcaaatgatggtgatgtgatcacaacctatgacgctgataaaatgaactctatcaacgtagccgttttgcagatttatccaggtagtggacacactatttctgacggtgcaattactggtgttacttcggtaactagccagaaatctggctttggtatgttcatctttgatgcacagaatagccaatggaaagtatatgatgctgataatcgtgttcgtctgcgtcgtatctatagtgatttaaacacagttcctaacgattacgtttttgttactgcaaacccttctgggactataccaaacgttacagttacccttccaactgatgttgctgatggtgatcgcgtttacgtatccctttatatgatgggtaaaaaccagaactgtacaatcaaagttaaagatggtacaacggacaagatccgcaccaacaaaaatatgatgcagttcccgcagcgcaaagactatccgcctgatgattggtttagtgtaacttcattagcatttaatgctgctagtgattacctcccgtatatcgagttttcttacatgaaagctacgaaagaatgggttgttgctaattatcgtccgatcgttgaacgtgttgacgcaactaacagatcgcgtactggtgttattgctctggctgcacaggcagaagtaaacaaaaacttggaagacaacccgaacgacgaaactgctattactccaatgacgttagcaaataaaactgctacagaaacccgtcgtggtattgcacggttagcaacaactgctgaggttaacaaactttcaaccgatacctatctggatgatgtgattgttacccctaagaagctgaacgaaagaacagcgactgaaacccgtcgtggattggcagaaatcgcaactcaggcagaaacaaacggaagcaccgatgatattacgattgtaaccccgaaaaagttgcataaccgtattgcatcgccgaccttaactggtatccttgcccttgttgctactggtggtgctcctaacaccaatacggatcgtgctcaggctggtactggggtttatgatcattcagattatcagaaagcggtaactcctaaaactcttcgtgagtataaagcgactcagttacaatctggcgctgtatggctggcttctgaaaccgaagttattaatggtactgttgcaagtgcaaacattccgaccgtagttactccggaaatgctgcacaagaaaacctctactgatggtcgtattggtttgatcgagattgcaactcaggcagaaacaaacgctggtactgattacacgcgagcggtaacgcctaaaacgcttaacgatcgtgctgcaacggaaacgctgacaggtatcattgcaattgcaaccactgccgaagtatcagcaggtactgtaacggataaagcgatcgtaccgtctaaactgaaaggttatctggacgatacaagccatattactgttgctactgctgacgggttaactcaatctgggactatttggactacggttaacatcggtattcaatcagcaactgaaactcaacgtggtactttacgcgttgctacgcagtctgagacgaacgcagggacattagatacagtatttgttacccctaagaagttacacgctaagaaagcgaccgagagcgcagaaggtatcattcaggtggctacggctgctgaaactaccgctggcaccgttacaaacaaggctgtttctcctaagaacttgaaaaatacaattcaggttgatacttcatggcaagctaccgatctggtacgcggtactgtgaaactgtctaaggggcttggtacttggtctggtaatgatgtggctggttctactcttccggatgatggttatgccgctgtaggtgttgctgtttctccttatgaattgaacctgacgctgaaacattatctgccgatcggggctaaagcggttgatgctgataagctggataacctggattcttcccagttcattcgtcgtgatgttgatcagacggtcaacggggcgttgactctaacgagaacaaccactgtacaggccaacattgattcaagcgctgatgcaacattccgcgtaatgaatgttaatggagatctgaacgttggtgatggttcgtcaatgggtaaacttcgtttgaatggtggttcatctaacgactggtcaattcaagcaagtttagcctctgggcgtattgcaatgatctcaacgggtaacactagcacagttcatctttctgtgtataatgatactcgtggcgttgtagctaacgttaaattccaggctcctgaaattcaggcgattagcaaagtgactctgggtaataataccgtgatcactgctgctggttctgttctatctatgggtacgaacaacaagacaactaagatcctgacctctgatgctggcaacatagtagcggaagaatcagcaaactcttataaagtatttactgagaagaacgcgcaaaccttgcttaaccctacgtatgtacgcaaagcaggtgatacgatgtctggacggttgacagtaaacaacagttcaattatcatcgcaggtcaagcggcttggtcaacactggatgcagtaacagaagcatctaggggtaactggacggctgaaatcacagcatcggaacagtacaacttacttcctggttacgcggttccggttcttgaaccagccccgattaatccggatatcatgattgtaaccagttatacctatgttaaagcacctggtactttaacgcagtttggtaacggaactgcattcacttatcagatttgggcacctcgtccgacctctggtactggtgttaatgcgctggcgcaatccttctggatccgtcaaatgaacccaattacgggtaaatttgatggttggggccgcatgtataccagcaacaacccgcctactgctggtgagattggtgcaacgtctgctgttggtactacggttaaaaacatgactgttaccgattggatcaaagttggtaacgttaagatttacccagatccggttactcagacagttaaatttgagtgggtggcataatgtcaaacttaatggcggggttcggccccgattttgtagaaacgcaaattctatcggaaacaaacagcgtaacttacagaataaccgcaaaggcaacacatcccaatgcggttcctaatcagtatgagtttacactaaatcaaaaggcggtagggacaccgcctagtgttgggatcaacgtatggagaattaacaatgctatagttgatccaattaaaaccttcacattatcgaatgataattcagcaactgcaaacaaagcgtttgttgaatatatggatgctcaaacttctgggctgtatttgataatgactaacggtgaatacaaaacaagccaaatcgttgatgattggtttgctaaaaacagatccgttatgtggcaaggcgctgatttcgctcagagattcccaaattctgcatatgttgcattgtatggggcttcaaaatctcgtatactgattgaatcgttttacgcgaacgatggagttttaaaagaagattcacgcgcatcaatcgatcttgtctatgataacgttggtgatgttgggcgaactggtgtacctttccgatctgttgaagatacggaagaatacaattcaaccaatgggtctgaatataaagtatatcctgttgcaaacccagtgatctctaaactggctgattatggtatggctcctggattagctatgatgattgctggtgatttttacgccagcaaagcattattggatgctggatcaacaacaagggttactgttcgatggtttacgggtactgctcaaacttcatcatcggtgattgaagttcctgcaaataaacctgatgagtggttacgatttgaacagttctatacgatccctagtggttgtgatggatttaacgttgctgtatctcgttatcctaaacccgctacggatagtttatctgcgatccgtaactttgtgatggttcaggtatctgctgccgaagctgatcaaaactttgctgcacagtttggggttaacggtatcagaatgaacaacatgatcgatgatggaacaccgtatatatttgaattgccgaatactaaggtttatcctggtggcgattattctgcttccgaattccgtgaagttgatgcataaacaaaggcccggatcatcgggccttataaatatgtaaaaaggggttattatggcagatttaaaagctggttctacagtcgggggtttacctatttggcactccggcacatttccgctggttccggttggtaatactctaacctatcgcggatataaggtttatactgaaaacgataaaccgcaagcatcaaataacgacttcgtttctaaagcaagcggtggtcaatatatgggtgtagttgcctttaaacaggggctacaaattaacgctactttcacaggcggaagtgaccagaacggtttatattctggtgatggtgatggcgcgacattatcaaaagccaacattgatcttgtatcatggtatggtattggtattcgttcatcttccggtactaatggtcgcgtattagtcatcaacgctcgaaatggtgatttaaacactcagggtaatattacggttgaaaagcaaatcagtattacaaccgctaaccctactgacgcaagtcatgcaacacgaaaaagttatgttgatggacagataaataatgtcacaacaaatgctaatagcagggtattacgcgctggcgatacaatgacagggctgttaactgccccgcaattcgcgagcacaggcgcggcttcccgtcccgaacacgtaccacggctcgaccaggtaattactaaagggactatcatagattttggatcttattaaggtgaaacatggctgatttagcaaaaattcaattcctacgtagcacagttgcggggaaaacacctactacaagtcagcttgcagatggtgaactggcgatcaacatggctgattatgccatttacacgaaaaatggttcttcgatcgttcagttagcgggtaaaggtatcccagaaacaaataccaaaaaattaacagttgatgggcctagtgctcttaatgataccgttaccgtagcggaaggtaaaactattactttcaccaacgagaatttaagtggtgaaataactcgtcatatcgtcggtaaatgtgccagcaatgatggatggtacatcggctccggtggtacaagcaataacggcattcttgaaatcggtactattgacgatggtactgaaacaatccagtttgtacaacgcggtgcaggtaacgtagaagccagaaaattagtcttacttgatagctctggtaatactactcttcctggggatttaagattatccactaataaaaccgttaaaattagtaatggaagcactcttacgttagaaatgggcgtaggtgctaatgatgtatacattaaaaacctgagaggtgcaggtgttcttcaattaactaatgacagcaatctggcattcagaaattctcaggtttattacgccatgaacggaagaggtcctggtaaatctggtactcttctgacgaacgtggaaaacaatcgtcaggcgtggcaatacccaatttcggctgcaactgctttaactccacgatggcttaaaatcgccacaatgaaacacccagcatcggcatcttcacagttagatttaatgattactggtggtattgattctggacacggtaagcatcatgtagattttattacattatccgggcacaatttaacatcttggagcactagcaatttagataactgggttgaatggcgcaggattggttctcctaataaaggaaacgttccagaatattacgttgttaaaaatgatgctgctacagattcagaggcttcgtttgatttttatgctaaagttcctcgatacggcaatggcctttacgttacagtgctaaacacctctggatacaacggccaagattcaggtacagtaattatctatgaaaccaatcaggacattggtgatactggaccgtctggaagtattcttgtttcgatgaaacaaatttttgacagtatcgcaaaaccagatttcggtgatactaccggtactcttccggttaatcgaggtggtacaggtgctactaatgttggtgatgctagaaataacttaggtcttggtactgcggccgttcgtgatgtcggtgaaggtgctggtaatgttttagaaaatggcgcttatggcttaggcggtaatggtggtaaatccatcaacaacattatctctaatgcggatatgttgacccgcttaaaatcatacggtggtactttctggcgtggtgttactaaatctggcgttagtgttcaaaacggcctttataaccacggctccggtatttttatgaatgctggtgataccatgtcagccattaatatcgactacgctagtgctaaagttcgtgtatacgcagctaacgacagtggtcttgctacaggaaatgttaagtacaatgaactttacggcacagcaaacaagccgacaaaggacgacgtagggcttggtaatctgacaaacgacactcaggttaaaaaagctggcgacaccatgactggtgatttaactgcacctaacctctatgcttctgggccgggaaccgcatcggtgtatgttgatgcaggaagcggaaatgctcatgtatggtttagaacaaacggcggtgagcgtggtgtaatttgggcaactccaaatactacggacttaggacaaattaacattcgtgcaaaaactactggtggtacttctgctggtgattttagcttccgttctgatggtcgccttgatgttcctgtagcagttaaagttggtggagcagcaatgctaaccaaagacgggaatattacctcaggttcgatgtttggtggtaaccttaacaactatttgaattctattaaaaacgacatcgttgctggcgataataagcaagtaagtaagactggtgataccatgaccggtaacttgactattaacgctaacttaaaggttgaaaatcctaatggatcgatggttgattttggttcagagaactcagataagtatagcagaataactcttgcacgtaaagttggctctggcgctgccgtagcaatgcttaaaattactcctgaagggtacgtgcaatttggttatcaagatgcagttgctactccagctcccagcaagtatctcctggttaaatctaacggccttgaggtagaaggggatttagtttttaatcagacctatcgcggcactgaagacgcagttgatattactgataagactaatgaccttaacaacatggttattaaaggcagtgatttaggtactcgtcagctgtataaatgtgtatcttctggtggtggttctaatatagctaataaacctacctctgacggcaactttgttcttgaagttctgtctttgcgtaaaatttctgataccgattggacatgtaagcagacctttactacaaagaacggtgatgttgaaggcacatatgttcgatactgccaaaacggtacatggtctgcatggaaagaggttgttgctggtgttcaaccaattaatttaggtggtactggagcaacttctgtagctgctgctcgtaataacctcggtgttggtgaaggacagagcgttaagttcggcggattagttgttgatggaaacatcaacgttgtttctggtaattttgttattgcaggccaagctcctactgataactcgcatctgaccaacaaaaaatacgttgatgatcgggttgcttctgccattagtaatgcgggtgatacttatcttccattagcaggtggtactgtaactgggcggttaacaattacaggcgatcagttaaaaactacatcacttttggttacgggagacactgctgttaatggtgttttaactgttgatggaagggctagatttaatcaagagttcattgtatcaacttcggttaacgtccagaacactggtaacagtcatttggtcttccgtaaagctgatggtacagaaaaaggacttatttgggctgatgagcctggtagcgttagtataagagcaggtggtgtctctgggccaacgtggaatttctggaacagtggttcttgccaattcccaggtgctattagtaactttaatggtgttaatagtactactaattaccctggcggcggaagtggcgcgtatttaaataccgctggcttaacaagtagatttagtaatggtgcttatgtttccttatacttccaagaatatgtaggaaattatcaccaggctattcttaatgttaatggattcggtcgagatgacaatttctatttcagggccggcggtgacttcttctgtactcgtaacggttcttttgataacgttgagattcgttctgaccgtagagccaaatcggatatcaaagttattgaaaatgctttagaaaaggttgaaacattatctggtaatacttatgaacttcataacacttctggcggtactactcgttctgcgggtttaatcgcgcaggaagttcaagaagttcttccggaagcagttactcaggatattgaagcagacgggggtttattgcgtctgaattacaactcagtaattgcacttctcgttgaatctgttaaagagctttctgccgaagttaaaaatcttaaagcagaaattgaagaacttaaatctaaataatgcatggggcttcggccccatcttttaggagaaataactatggcagtaacagggccgtgggtcggaagttcagcaaaggctgaaactggtgagtcgtggatggctcaagctggagcaaaattaagattaggaacacctttctggatgtctaatatgataggacgaagtgtttttaactttagtttaacagtgcaatatcgtaactggaacaatatttactatagaggttcatggcaagttggtggttggaactggagtcctaaaccgacaacacaaaatactgtgcaaggaaacttcgaaggtaaagaagttactttatttgtgtctgtatccggacaaggcggggttaactattggaatggtgaccctcaaggtacaactttaggaataagaaatggggacgctataaatcttcgagtaatgatgtcagatggaactacatttgattttaatccaggaaaaatggatggagatgtaagaaactatcaaattgtttcaaatgatgaagctaataagcttaaagattggtttagtaatagaactgaccagtactgggaaggccttataactagaagataacaataaatagctatgtaaggagagcaatatgatgtttatttcagtggaactactatgattgacggttggagaagatatagatgcgaaaacgctgatggcctcaatggatattttgaagctagaatgaataatcagtttggtgctttattagaatacgtttgatagataaaccaacaaactcacactattaaatagattaaaaggctaccatataggtagcctttttgttgcatcctaaatatacctatagtaaactaagaagagtcttataaaatggctgagagaaatcccgtagataaactagccttatttgatcgggtaatatcgtttgtgatgggtgtgaaaacatggaaacaattgctgataaaaataattctaataatggttatgtttcttatggtagtaacttggtataaatggactgatatattcccgatgataaaaggtgcccttgtagtcgatacaagggctatcgaaattgaaagaacagaaaagtttaatcaatccgcgttggaacagttgagcatagttcatcttacttccaacgcggatttttcggcggtactggcattcagaccaaagaacataaactattttgttgacattgtagaatatcagggaaaattaccatcccagatcgatcctaaaaacctcggcggttatccgatcgataaaacatccgaagaatacacgaatcatataaatggcttgtattattcatccactaaagcaagttcctacctaccgacacgtgattttgtgccagtagcttatacttttagttgcccttatttcaatcttgataactactattctggatcggttttgatggaatggtacgcaaagcggcctaatataccagatatgaagctaaacatcatatgtggacaggccgcgcgtattttaggtcgagtgaggtgattaacgtaatgctggtgttaaattgtgtgttcttccaatagcccgtttgattgctttaaagaagttcatcaccgggctatttttctcgtaaatatcccagactttcaatttgtcccacggatccggaacataatcttcattccttgccgaaacccccaacgtaacccgcctgtatccagcgctgtcgtgataatacacgaagaatggcctacctattggcgcaactttacaacctctcttagcggctctcatagcctcatcgaacgtcatagattcccccaaaaatttctatgcatgaatggtcgaattccgatagtttcactcaaaatgaatatcggatgatctagctcatcgtggttttcttcgtcaatgacgatatcccaatcagtagccttttgttcttctaccgtggcaatgaatacctggtttacttcacacttgcggtgtgtacgtctgatgattgtatccccttcacgaaacacaatcatatcaggattggtagtacggtacgcggttttacccgcgcacacttcattaagcatatcttcgtatgtcattataaaacctttacacgttgaacgatggtttgtttaacgtctttgtattctccgtgctctttaacggttgctttgaaagtgatttcatcaccttcgtttgcaatgttattaccgaagtaaacaacaacattaccatcaacattaattttggtcatgaatctttctacagaagtgtagtaagaaacttgagtatatcccagtgaaatcactttctcaacggttccggtcatttccagacgttgtttgatttcaccgatgtggttagctttagaaatgcgttcctggcgctcttgttcccactgttcgcggatttcttcgcgtttggcgatataatccttttccagtgcaacacccatgcagtaagcgcacacagcatcgaatacagggctgtttttgttgtcttctttagactggtcagcccaccaaagaacagtaaacattggcatttctgcaattacttcgcctttacgtttgccaatcggcatgatcccttgttccagtagttccagtttttcagtatcgaagactgacagtttaccgcgacgttcgaacagatcgaaatctgcaaagccctggaatatcattttgaaagtatcagtttcagttaaacgggctgaaacacggtcgaaatactcacgcgctttcgcttccgctttctccggatcggtagataagttgcagatatagttatcagaagtataaccgccgcctctacgctcaacacgcaaggtatacattgcatttttacgaccagaagaaatgaagtaagttgtagtaactacggttgcgttagtcatggtatttctccttaaaaggtatctcgtttcgatatggctaatatagcaaaagcccccgaccgaagtcaagggctttttaatcattcattcgaatctttcattgctttatgaagatgaatatcaaaaattttccagtacgcctttccgcgaggataaatttttgctttgtcaatatcgttgttgcttccccatgtattgtttgggccacgacagcgattttttatataatccgtatgccagaataagcgttgaaccgatgattccgtacctaatggatcttctttactgaacagaatttgtgtactcataagaagaaccctgttctaactactaaatcgatctgtttttccggtatcagtggcacatctgcatcaacgttgcactgataatacatcccgacatactcatgaggaatgttggattcactcgcccatgccaggttgtcgtctgtacgcggccctaacatgaggttaacgatatcgacagcgcgatcctgttctggggtgttgttgcatccgttcacataatgcccgtgagcggttttgaggatttcaatgatatcttcgtcggcttcaacgagatacagccccgtgttttctgggatttcctcaagaataatcaaagcggttttcatcacacttacctttatgtttctgtttacgttttgcttctttaagtgctcgcttgcgatcgcggtgagtagaagcgcggttaatccatgcatgtttcgctaccagattgttcatcgaggatataatggcacatgatgttgaatactgacttcaccatacagttttacgatagttaagctatcagatcctttaacaattctgtatttttctggaacaacgcggtcgatttcttttttgacgaagttaagcaatccgaagtcatctatatcttttggtgctttggaaatagaagacagcgatactcgttgacgcgaatcatagtacgaagaaattacaaacatatattattttccttattggggcttttcagccccattttagagaattaatccagcaatttgcggatcttgtctgcgatacgtccggcacgggttgcgctttcggtatgattgctttctttggtagccagttcagccagcttacgctgatgttcttcttctgctgcttggcgatctgctgcaacctgtgcaacctgctcattatcgtgagcaatacgcgcttccagttcagacagggttttgtcgaaagttgctacgatttcatctacagaacgaattttattaaacagtttcataatttatctcaattggttagttttaatcagtatacatcaatacggctggaattcaaaatcataaatgtcattcagtgcgcggttccactcggtgtagttttcaccagcaccataacgcatttgaatagcactttcgaacgttgatccgttgaggttcgggaaaccgaacaggtttttgattttgtcatgtgctacatagtacagagaagcactttccagcatcgcaaccatcgcagacggttcgtgttcgcggcgcttgatacgtaacagagtacgactagcaccagttttacggcgttgatttggtgctacgtagaaacggaatactacgcgccctgttttatcatcaactaccaggtaaaacccgttttctttcagatccacaccttcgaatttcttgaaggttccgcgtttcatgtcaccaattttaattgcgtatttgtgaatgtcaagtcttgtcagaattcttttcatattttttagataccagtttgcctaattttgtaatttcgcctgtttttacgttaacaaacaaggcgatgctcagaaatgggatgctaatcactacgctgatcaatgtaaacagaaaacgtatcacaaaaagaacagcacgttcaagatatcgttgcatccacgcgattcctaaacaactataccctactataaaggtggttgcaacataaaatgcaccaaatcctttacgaaatacgtaacctttcccggattctacccggtcgtcggcccacatttcacgggcggttttgagaatagattcaccactagcgcgggtttcgttagccgaaggcatgtttttaaatttcatgatagtctcctatgcgcccagaactctccaggcgcggttgtttag

SEQ ID NO: 65 - DNA, 49574 bp, unidentified
  source 1..49574: mol_type = genomic DNA
atgaccataacccgcttcggcgggtttttttatgcctgcaatctgatatactcgcaactcaacatagaaggagggttaacaatgtctgaagaacgcagaaagcgcgtgacgaaatcacactttgagggcaacttcaaagcgctatatgagaaggaattcggcgtcgtgctggggcgcacggcagaaatgacgccggaacagttttttgatatcgcaaagcgttacttccaatgggcagaagagaacgcaatcaaggctgcggaaacggcaacgtttcagggcgacgttaacgagtggggagtgaacaagcctcgcatttttacgatcacagggttaagcctgttttgcggcgtgaaccagtcaacgcttgggcgctaccgccacgatcccaactacgctcccgttatggagttcatcgactccgtaatctatgagcagaaattccagcttgctgccgtcggcatgattaacgcttctttcgtcggaaaagagatggggatcgataatggagccaatatcaacgtcaacgccgagggtggtgcggcaaccatcaccaccgaggaagtgaaagccgcagtaaaggacgtgctggatatgatttgatgataaaccagctatatgttattatgccttcaccttaacagatgagggcattttttatgagcaaagcaaaacaactaccgaaccttgactacctgaaaagaattcttgattacgaccccgacactggaatctttcgctggaaagaaaagataagcagaaaggtagttgtaggaaaggtcgccggaacacttaacaaggtgcaaaacaggttcaacatacagataaatgggaagatttatcaggcatcaaggttggcgttctatatgtacaatggtgttgagccggttggcgaggtagaccatgaaaacatgatcacaactgacaacagaggctgcaatctaagagatgcgacacataaccagaacggcatgaacaagcggaagcaatcaaacaacaccaccggatacaagggagtcagctttcactcaaagcgcggggagtttatcgcttacgccaagctgaacggtaaaatgcatttcgcagggtggcacaaaacagcggagagcgcagcatgtgctgctgcgtcaatgagagaaaaacttcatggggagttcgttaggcatgagtaatttaataatttgggaggatttaacccccgcgcagaagatggcgattaaggggttgagcacgcagaatttcgaactatttttgaaaatctggtttcagatcatccagggcgagaaactaatgtggaattggcatcatagctacttctgccacactatcgacgaaataattgctggaaagagaaagagcacgatcgttaatgttgcgccaggctcaacaaaaactgaggccttctccattcatcttgcgccgtatgcatatctgaaatgccgcaaggttcgaaatctacagatctcgcagggtgacgcgctttctaaaggtaactctgatcgcgtaatcaagatattttcgtctagcgagtggcaagaattgtggccttcgcggttcgggcgtaaacagatcgatgaattccaggtgattgatgacaacgatcgcgtaaggctggaaatggtttcccgctcatctggaggccaaatcgtcggtaaacgtggtggctacatgatgccggggtttagcggcctaatcgctcttgatgatatcgataagcctggcgatatgtggtcaaaggttaagcgcgaaaagaaccacgtactactgaaaaacaccattcgatcccgtcgagcgaagaagaagaagggcgacgaaactccaatcctttccgtgcagcagcgattgcacgcacaggattccacctggttcatgatgagcggcgggatggctatcgaattcgatcgcattgttattccggcgatggtaacgagggaatacggcgaatcgctccctgactggttgcgtcctgagttcgagcgagacgtgttatccgggccgtcggttgtcattgatggtgtagaatactggtcattttgggaggacaacgaatcgatcgagaaccttgtcgccttgcgcgaggccgatctttatacattcctttcgcagtatcagcaggagccaatcgccctgggtggtaacgtgttcaagtcggagtggtggcgctattacggcgactccgacaaggcgcacgagccgcgccctgacaagttcgaatatacgttcatcacggcggacaccgcgcagaaggtcaaggagctaaacgactactctgtaatgtgctattggggcaagtatcgggatcgcgtctacttcattgacggaattcgcggaaaatgggaagcgccagatctccgcgttcaggccgaagcattcatcaagcagtgctggcgtcggaacaaggagtgcggaaaccttcgccggatctacatcgaagacaaggcgagcggtactggtctaatccaggatttaacgaaggcggtaaacggcatgggcgagatcgtcccggtgcagcgcgataaagataaagtcactcgcgctatggatgcacaaccaatcatcaagggtgggcgtgtcgtgctgccggacaatcacccattcgttgcagagcttgaggcggagatgagcgcgtttacatatgacgattctcatccacacgatgatatttgcgacaacgtgtttgacgccgcaaacctggaaatgaacctgagcgacgatccggtagagcgaatgaaacgccttgcgggattgaaaaagctgggtcgctaatacataatgtgggcctgacggcccacacttaaacaaggttgaaatatgaataacattaagatggacgactataatcaaatctttaatggtggctctggctatgcgtcaaccctcgcgtctatcgcggcaagatttggaacaatgtcgcaggttgaagagttctatcatgaaaacggcatggcgaagaaaatcgttgacgtgatcccggaagagatggtcgctccaggcttccagctaaacggcatttcagataacaccaagtttcaatcagaatgggacgggttaaatctggagccgcaaatcaccgatgctctttgctgggcgcggctgtatggtggctcctacgtcctggcgatggttaacgatggtcgcgcgttgacttcggcagcgaagcggggtaagccgctcgaatctatcgttgtttacgaccatgattccgtctccgtagcagaggaggaaaccagcccacgaagcccacgattcggaaagcctaaaatgtacgaggtgaagccgctgaacggcgggcaaccgttcaaagtgcattatacccgtatgcactacatcgacggcgagcgagtaaccaacaaggtgcgccagctaaacaagggtgctggtggttcggtgctgaacaagtcgatcattgaagcgattcttgactacgactattcggaatatctggcaacgcagctactgaagcgcaagcaacagggcgtttggaaggcgaaaggcctggcgctaatctgcgacgacaaagaaggcgagtacgccgccaggttgcgcatggcgcaggttgatgctaattccggcgtcggaaacacgatcggcattgatgcggacgacgaagagtacaccgttatcaactccgatatttcaggcatcccggaattcctttccgcgaaaatggatcggattgtcgccctgtcaggcattcacgagatcgtgctaaaaaacaaaaacactggtggcgtaagcgcaagccagaacacggcgctacagacgttctacaaactggttgaccgcaagcgcaatgacgattacaagccgctgttagaattcctgttacagttcatcgtaacggaggaggaatacagcgtcgagttcgaaccgttgtcgcttcctaccgatgcggagaaagcggatatcttccagaagaacgccgatgcagcacgaggccttgttactgaccaggttattgacgccaatgaggcgcgtgataccctgtcggcgttgattccagaactgaagctaaaaggcaacgcgcctgaacagaaaaaacttccggatcgcgccactggttcaggcggcacgcaaagcgcagagatcttaaacaacacggagacggatgatgaaagttaacggcagaatcccaaactggcgttatcctgaagcaagcgaacgggagttatcccgttccatgcaggacgcggtgacagaactcgttgtagaaatgcgtgatcgcttagatcgccttaaatttgacgccacggctgaggaaatcagccaggcggaagacgatatcagcgaatcttccatcgttttcttttccgccgtaattgcggctctttcctccattgggttgaccgtctatagattcaattctaagcagtggcttgcaattgcgatcgcgtctggcgggaggaacaacgaatcagttatgcgccttaaagaattcggcgctggcgggtatgaggattggtatcaggaggtgctgaaaaagtggcaggattccgcagaagcgtcgatcaggaagttggcaggcgatatcgtcgccgactggacaacgaaagttagaaccgccaacaacattggcaagtctcgcaagcagatcgatgaaattatcgaaggtcgatacgctatctatggtagttggtcgcgcaaccgggcaagcggaatcatcggaacttttaacagtatgttgatgatgcagcgcctaaaagatgctaaagtatcgcattacttttggttcgggatgatggacgaccgcgagcgcgagagccatatcaagctagaaggtaagagacgccccgttaatggtgacggcattttccccggtgaagaatatcaatgcagatgctgggcgtgccccgacttcgaaaatattgagggttagcatggattggaataatgtattcacctatgatgatggattacttagatggaggggtaagccttctaataacgttgaggctggagatgttgctggatgttttgatggtgatggatacagagttgttacaataaagccaaagcagtacaaacaacatcgaattgtatgggagatgcataacgggccaatccctgaaggaatggagatcgatcatgaaaaacacgtaagaagcgataacagaatcgagaacctgagacttgtgacaataaagcagaataagcgcaattacacaaggctaaggaataacacttccggggtaactggcgtcagttggcacaaatcttacgaaaagtggcaagtgacaatttacgacaatcacggaaagcgagtgtacctaggaaggttttctgactttgatgaggcggttaaggttcgcagagaagcagaaaagttatataattaccaccataatcacggagataaaaaatgaaaagagttcaaaggttcgacacggtaaagatgaaggcccgattcgatgagaacggctttctggttgacactccgatcgtggcgcgtatcggtgcgcagacgtaccagacgccaaccgggcagcgagtcgagttccgcccgcgttcggaggtgttcgatgctgaatcgctggcttcataccagggcaagccgatcactttgggtcataagatggtgaacgcacagaacgcaaaaggcctggtcgttggctcgtgctccggcgctggcaaagaagaggggatcggtgttcttgttccggtgatgatttacgacggcgagtcaatcgagcaagccaaaaagcgcgtagcggctgagttatccgtgggctacacttcggtcgatatcgatcgcaaaggttggggcaacaacgcaactggcgaatattatttcgacgaagacctaccggaaaacttcgaagagatgaaaaatgattccgtctctgattgggttcgctttgatgcggtgcaaacgaagattcgcgtgaatcacgtcgcgcttgttttccgtggtcgtgccgggattgcgaaattaaatcttgatagcgaacaagaattcccctatgatgacgactcaaaccacaaaggagctaaaacaatgatcattaaaattgacggcgtagatgttgaagtagccgataacgtaggcgcttacattgccaaactagacgcgcaagttgcatcggcaaccagtcaggtaactagcatcaccgcagagcgtgacgcgcttcaggccaaagttgatggcattgaagatgaagttgccgcccgcgttgctaaaatcaaagccgacgaagacgcaaaacagaaagttatcgcggttgtttctgccgctggcgtcaagtgtgacggcctggatgttaaggcaatgaaagttgcttacatcaaagaggtagatggtcgtgatctgtctgataaagaagattcgtacatcgacgcttcttttgactttatcgccaactctgataagattgctggcaaccgctcgaaagtctttggcaagaaagtaggcggcgagcagcaagataaaggcggcttaccgaaacttgacggcaccgaaatcatcgatccgcaggcaaaattccgccgctaataatttgcggccttcgggccgctaccagaccaaataaacaggagattcaaaatggcacagattccagcttcttattcacgcaagcgcgatattgctgttccggggcagatcactgatacgtcgctttacaatatcgacggcacttgcgttgctgaaggcgatatcaaagctggcgtactggtggcttccactggcgcagtttccaatggccacaaggtcgttaagccagcgaaagcagcgagcgacgtcattgtaggcatcgcgcagttctcgcaagcctactcgcctgaaggcaagtatgacgatgagagcgcggttaacgttatgactcatggccgcatttgggcgctcgctgacgccactgttacggaagcagattgcgcgttcggttctttcgtcacctttaccgcaaacggcaccgtagctaagggtggtgccggggttatcaaaactggctacaaacacactggcgaatacaccaaaaacgcagatggcactgttctggtgaaagttcaggtgcttcagggcgcggtggctccggcggttgcggttggcgtataaagtaaggggcttcggccccatttttgcaccagaaaaaaacctttgacggcttaacgattcgtgatattcttcatctcgttaagccaaatacacaaacaggagtttttcagatgactatgaaattagatgcattcgaacagagtgcaattaaggtcgcaatgcagggcatgggcgtcgatgccgcaaaactggatgcttacggtatctggactgttaagcagatgactcaattacttaatcgccagtatgagcaggcatacccgcagaccagcgcacttgagcttttcccggtaactaccgagatctcgcctaccgcccgacgctttgagtggctcgaattcgatggcgtaacttctgcgaaaattatcgccgattacaccgacgatctgccgaccgttgaagcgatggcgaaagagaagtcagggaaagttttccgcctgggtaacgcgtggtttatttccatcgacgaaattaaaactggcgcggcgctgggttccggcctgagcgatcgcaaggcaactctggcccgcgaaggtcatgagacgctcgttaatgatctggtgttcaaaggctccgctcctcacggcatcgtgagcgttttcgaccatccgaacattaaccgcatgaccgcaagcgccaaatggggcaatgatgcagcagcggctgaaaaggcattcgaagatcaggaagacctgcttaacatgatcgaagaaaccacgctgggccgccatcacgcgactaacatcgtgatccctccgtctaagcgtcgtcttctgaccaagaagatgccggacactagcggcgactcttatctgacatggttcaccaagaaccacccgaacatcaccattacggcgatggcggaactggaagatattgacggcgcaggcaccaaaggcgtgctggcatacgaaaaagacccaatgaacatgagcatcgagatccctgagcggttcaacatgctgccgatgcagccgaaagacctgcatttcaaagttccttgcacctccaaatgcactggtctcatcgtgtaccgcccgctgacaattgcgatccttaccgggatttaatcaaaaagcgccttctggcgcttttttattgcattgcattctacaatgtgctttaatttgaaacctaaagtaaaccaatggagcattaacaatggccagtaaaaaagaaaccgtagaaaccgtagaaaccgtcgaaaccgtagaaaccaccagtgccgaacaggagtcgcaggttgttcaactacaaaacgttggtgcatgtgcaattcgctataaaggcaaaaattacgtctatgagcaggtttttgaagtgccggaaaacgaaatcgaccgcttccgccacgaaatcttcaaaggccgcgtcgagttctacgacaatccgaaacgcacgcgcgaatacatcgcagcagtgaaggcgaaagcgaaagagatcgtgcagcctaaaagcgcggaataacaaaaaccaacaaagggcgcttcggcgtcctttttcatatcaggagatcgaccatgagttacacaattcaagatgtgatcgataaaatgcgcagccttgcacctccgcttaaagaagttccagatgaactgctgtctgcgtgggctgtgcttgccgaagagttcgtttgcaaatccaggttcggagattccattgttacgtcgatcgcattgatgaccatgcacctaatgtttttggatggcgcgatgaagcaagaaggcgaaagcctggaatcttacacgcagcgagtggcatcgttcaccctgaccggggagttttcccaaacattcgatcgcgtatcggcgtcaagcgacaacgaaatgctttctacgccgtggggcaaaatgtactggcgtatgctcaagatgcgcggcggcggcttcggacttcttaccgccgggaacgttcgccgctgcggaattggtaggtgatcgctatgaactacaaacaaatccaggcgcgcgcaagcgcgggcattaagtttttcagtgacgctgacggcgtattcaacaagtacacgaaaggcgctggcggcggaatcgatccggaaaccggggaagatatcattcctggcgaggtggtaacgacaatcaagggcgcgatcagggatgtaaatggccgtgacattaacggcgaaaccatcctcgctggcgataagcgcggttttttcactcatgatgtgccaatcatggagggtgacgaaatcgaagtagacggcgagcgctaccgcgtggttaatgcccgtccggtaaaaccgacgggaaccgttgtcgcctaccgtccagttttacgcagggtggcgacttatggctaattatacgatcctggagttcacaggggctattgatgcatggtgtaaggccgctggtgatgcgctggaggacgttgtaaggtttacgtgtgaagatattcaccgcgaccttgtaatgcgttctccggtggatacagggcgcttccgtggtaactggcaaatcacctttaaccgcgccccgctttacgcgattaacgcatacgaccaaacgggcgagaagacaatccagaacggtaaagccaacattgcactattcgcaaaaggggccgggatcacttcgatctggttcagtaacatgctaatctatgcgaacgcgctggaatacggccactcaaagcaggctcctaacggcgttatgggtgtcgttgcaatccggcttggcgtttatgtaactgaagcaatcaagcgagcgagggcaaaaaatgcattatgatatggcgttaaaatgcaaggcggcagtggctaaatttgccgccgagaacgggttgatggttgcgggggataacgttgactttatccccccgaaaggcggggaaacctaccttaaagtctcctacgtcgaggcggattcaagatcggttgacctttcaagaaaatgccgagtctatctggcgatggttcagattgatgttatctttaagcctgggatcggaaccgaccacgcgaggattatcgcccaacgcgttgcaaaatccttccctgaaggaaagattgttgatcgtgacggtaagttatatgcgagcgagtgggcggaggtacacggcgtgcagaagcacgaaacggggtggttctttccggttcggttcacagtaagatgcgagagcgtggaggaaagcggttatccatcaacatgactggtcttagaggtgcttataatttcttgccagcctggaaatatataggcataatggcgttgttaaactttcatcaaaacaggagtattcaacatgcatttaccaaacggtgcaaaggtcttctttgagaaggctcgcggtgcggcgattccgtttaccgcaatgaccaacgacgcgaaaaacccaaaaatcacagttgcggacggcaagctgaaagtgaaagatattgtgatcttcaccgattgcacctggggcgacttcgttaacaaggtggctcgcgtaaaagcagtgacagcaggcgtggcaacgctggaagagttcgacacctccgacacgaacaagtatcccggcggcgcggccactggtaacgttgtcgttatcactggttgggtcgaattgccttgcattcaggatttaggcaaagacggcaacgaacagcagttctataactatcagtgcttgggcgatgagcgcgaacaatccgaacctacttacaagtcggcggtgacgcttaactacacgtttgcgcacgagtacgataacgagatctacccggttttgcgtgcagccgacgccagcaagcaggcgaaagcgatgtacatgtatatcccgcgagcttccgaggttcgttactggtctggaattgcatctttcgatgacattccttccacggctgttaacgagatggaaacggtaacgcttaacattgcgcttaaaggtgcgcacgtcttccttccggttgccgtgtaattaaatggcggggcttgtgcctcgcctttttttgtgcataatagcgaataacacaaaccaatcaggagttaacaaaatggctaaattcaaaattcaaatcggcggcaatctaccttctttcaagctgcctgtaaccttcacttgccccgacggcaaagaagctacaatcaccatgaccgtaaaacatcgctccaccgatgagatgaaagacttttatgagagcgaagataaagcgccaaagggtaacgccgagtttatccgcttcatggctgaaggttgggatctggatgacgaattcagcgatgaaaacatttcctggctttgcgctcacttcccggcgttcgtcatggcactgccacaaacttacatggccgcgcttgcgggccaccgtgcaaaagtttaaggcgggctgtttatctcacgcttcagcctgagctaaccgatcgccagcttgcggagtacgggttaaggcgatcggattatgaagcagatcttgaaacgatctattttgatgaacagaccgcccaaagctggcagctattccaggccatgcaaacgcagtggcgaatcgggatgaatggcccgacggggcttgactataatacgttgcctatgctgttcgaattgtataaaatcgacaatcgagaagcggcattacttgacttgcaaatccttgaaggtgaatacctgaaggagatttacaagaaatccaaataagcgcctacgggcgcttttttcatatgggggcgaaacatggctgataaagtagctgggctaacgtttggcgttgacgtgtcgcaggttgataaagcggtacgatcactcgcagaactgaaaaaccaaagccagcaaacgggcgctggtctacagtcacttgcagacgctgaaaggcgggccacggcgcagaccgaggaaatgaaccgcgcgttgcagcgccaaaagcaagagacagataaatcaaaaaccagctttagcaggatcgcaagcgccatcgatccaacgatctcaaaaatggccaacttgcgcaaagctacagaagaacttgataaggcgtgggctttggggcttgttccagataaggaatttttccgcctgggcgctatcatcgaatctactaccaaccaactacggcggcagcaggcggcgctaaccgaagaaggtcgcgcagcaatcgcagaggcggaggcaaagcagaaggcggcaaacgccgggcgtgattttgtcgccagcctgaaacagcaggctgactccatcgggaaaacacgcgccgaactgctggagatgaaggcggcacaattgggcgtatcggcagaagctgccccgttcattaacgcgctgaaacagcaagagcaggcgttaaagaaacagcaaaacgctatgggcctggctggcatttctgccgggcaatataaaatggccatgctccagttaccgatgcagatcactgacattgtaacgtcgctcgcttcaggtatgccagtctggctggttgcggtgcagcagggcgggcaaatcaaggacagcttcggcggcttgagtaatacgtttaaggtgttgttgagctacatcaacccgctaacggttggtgctgcatcgttgggtatcgccctggcggcaatcgctaaagctggttatgactcctggagtgcgcaacgagaactggtgaatgcgctggtgctgactggtggctatgctgcgaccaccaccgggcagatcacagccttaaccgaagagattaacaaaaactcatcggcaacgattggcagcattcaggaaatcgcaacatcgctcgccagttctggtaagtacaccattaaccagattaagcagatcacgaagactacggcggaatggtcggcgcagactggagaaagcgagaagacgatcacagggtattttgattcgatcgtaaaagaccctgttaaggggcttgccgatctcaatgagcgttttaattttctgaaagagggccagctaacctacatcgaatctttgcgtaaaaccaaaggcgagacggcagcagcagatgcggcgacaaaactgtttgctgatactatggataagcgccttaaagatatcgctgacagcgcaacgccgctcgaaacgatgtggatggatattaaaaaatgggcggctgactcgtggaaatgggtaggcgatcacacggtaggggcgctaaaccttatcgttgacacggtttccgtaatcatcaacacgatcaggaagctgattgccgacggcgacgccatgatcgcgcagtttatcgttgacgctggccgacagctacagaaaatccccggcatgggagactttgggaatgattttctggcgcagcaggagcagttaatcaaggactcgaaagccaaatccgccgagtttgcaaaaaccattgcggaacagcaggcaaggatcgcaaaaggcgagatgggttacattgacgccgcgaaggataaaaccctttcaggtgggtacagcagcaaaacaaaggatcgcgtaaatcaggaagaaaaagatatcctgaaaaaccgcaacgccaggaagcagcaggtagacgctggcgttaaaattgatgagcagtaccaggctgaactgctatcgctacaggcgcagctaaaggttttgcagcagcataaagggcttgacgacaagatcagccagcagcgcaaagactacttcgagacggtcgccaaattccaggttttggaagaggcaagccagaagcgaaaactgacccaaagcgaacagcagatgctggcgaacaaaaagaatatcctgtacatggcggaacaaaaggccatcgtgggagatcagattgttcagcagcagagactgaacgccttgcttgacaagtctaccaagtatcaaaaccagatggcggagaaaaccaaagcgctacaggataccgccggaatgggtagcaaggagcaggagagataccgggccaatgcgcagatggcggctgactggaaaaacaacggcggatctttaagtgaccctggatttaaagcgatgcaggccgcaagcgataaattctacgcacagcaagatgcgcaaatgatgaactggaaggccggatttactcacgcgtgggctgacattggcgacgaagttaatgacgtatacaccaacatcggggatattactaaaaacgcatttagcggaatggcgagcgtgctgactgattttgtcatgactggtaaggccagctttagcgactttgcaaagagcgtgatcactgacattaccaacatgcttatcaagatggcgctgtttaactcgctttctgctgcgtttggtggtggtggcggcacgttcagcttcgccaacatgttcagcaagggattttccggcggtggttacactggcgacggagggaagtatgagccaaaaggcgttgttcacggcggggaattcgtattcaccaaagaggcgacgcaaaggttaggcccggaaaacctgtaccgactcatgcgcggctatgcaagtggcggcctggttggcggtaacgcaagttcaggttctggaatcaccaacggcggcaatgttgcggcgtcggctgcgatggtgttcactatcggtgacattaacattacgatgggttccggtcaggatagtaagggcatggagcaaggcgtaaggcagatcgtcaacgatatgttcaccgaggctttgagccaaaacgggcgcattgcgaagttcgtcaatgagaaaacgaggaggtagtagtggattcctttaaatggtgcacacaaattcaaggaggggcggcaaaggtcgccatctccaacaacattcgatcgattgttttcggaaacggctacatccaaacggcatcgagcggaattaacacaaagcgcaggacggttccgatcgtttatggcggttcagattgggatgaggtttataacttctgtcaggatcacgtaacaaagccttttgtgtggaaggcaccggatggaagaatgggcgtattcgtcgtaactgccgactccgttaaccttgcgccgcagggtggcggggtgtttgaggtaacggctgaattcgccgaacgcttcacttcagccggataatcaaaaagcgccctttacgggtgcttttttttggcctatgatctggagtcaattagaggagggcttacgatgacagccaatgtttcaaaagagtttgcgaactgcttacaaaaacttttccccggcgagatcctaacgctgattgatatcgacgccacaaagttcggcgggcaggtctaccgattccataacgagaacgtcgcctatacaaccgaggagcttttagcagcagtgaacggcgggacgcttcagcccaaaatgatcacgtttcgcggcgagcagtacggcccgcgcccgttcggcctgggcgggatcgcaatgtcgagcgatggcacagtggaaaagccaacgctgacggttagcaatatcgatgcgcaagcgagtgctcttattcgcgcctacaacggcctcatgcaagccaaagttacggtatgggttttggtcaaggaattgctacaaaacgacggcagcgttaaagagggcgattttaggcgatttgtctactacatcgagcgcccaaaacaggtcgacccgcaaaaggcaacgttcgaattaacatccgtgtttgatatggatggattaatgatcccggcacgcctaacgcaaaccgtttgttattgggcgcagcgtggctggtacaagtctggcaaaggctgcgactacaacgggcagaacggatacttcgacaagttagggaacagggttgacgatccgtcgcaagatgtttgtggcggactggtttcttcctgtaggcttcgttttggtaatgagccgttgagtttcggcggttgtgcgacagcaactttgaagagtggtagataatatgttgactccgaaaattaaaatgcagatcatgcagcacgcgaaggaagtctacccgcacgaatgcgccgggctggtaacgcaaaaatcacgcgtgcagaaatatcaccgactagacaacgtttctccagatcctgagaacgaatcaatgccggacgaaacgcagtatgcgatggcggcaatggatggagagccgatcgccttcgttcattcgcatactggcgacggggcaaccacaattccgagcgccacagatttatgcttctgtgatgagtctggcttgtcgtgggttatcgtctccatcccggaaggtgatatgcgaatcattgagccgaaacgccgtccgctgattggtcgaccctgggctttgggcgcttatgattgctatggcctaatcatggattttcacaagcgccacggcgtcacgctaaaagatcggcgggttacgttcgaatggtggaagccggaatacaaagagaatctttaccaggactactggcaagaggacgggttcattgaaaacactggcgagcctgaagttggcgatatgatcatttttcagcttcaggcggagaagtggaatcacgcggggatttacgttggaaataacaacatccttcatcacgcatatggcaagctgtctcgccgggatatctattctggatggtacgagcagcacaaggttttaatttgcaggcataaggagctaaaacatggcatcacatacaaagacgattaaactatctggctccctgggtcgtcggttcggtgtcttccacaaacttgcggttgattcagtcgctgaatgtatccgggcgctgtcttaccaggttgaagggtttaagccgttcatgcagagcaaagttggttcaaacatgcgattcggcatcatcgcagacggaaaaccaatcagcacggacgactttgctactttcgccgtggcaagggagattagaatcatcccgatcccaagagccagaaagaacggcgggttgttgcaggtcgttatcggagcggcgattatggttgcggccttctttactggtggcggctcgctggcggctatgggcgctttttcatctgctgcatttatggctggtggctcaatggttttgggtggcgtaatgcagatgatcgcaccgcagatgggcggcaacatgcgggcgagcgaatcacctgagaataaaccatcgtatgcgttcggcgggccgattaatacaacggcggcgggttatccaatccagttgccatatggttacagattggctggcggtgcattgttcggttcgggatcttacgcagaagacaacaactaattaagccattcgctttttagcctgggggcgtagcctccgggctttttgtcgtgtacaattgcgatactattaacaggaggctaaacgatgactaatatcaaggcccgcaagggcggttcaagcaagccacgtactcccgtggaaatgccagataacctgatctcaaaagataagatcaagttgttgcttgccgtttcggatggcgaggtggttaacgacttcagcctgaagcagttgcattttggcggcgtccaggttcagaacgaggatggaacattcaactatgagggcgtgattgcagagttacgccccggcacgcaaacgcaggactacattcatggcttcagtgagtcaagtgctgaattccaggttgctcgtgaagtcactcacaacacgccttatacgcttaccgtatcgaacaaaaatatttctgctattcgctttcgcctgttatggccgcgcgtgctgactcaaaaagataacggcgatatggtcggatcggttgttgagtacaagatcgagatggcggtagatggtgcaagttatcagacctacctaactggcaagattgacggtaagaacacgactggcggttacgatcggagcattcgcgttaacctgccgcaaaacttcacgtcgcaggtgcttatccgagttagtcgagtaacgccggacgctgacggggtgaaagttgtcgacgctttccgggttgaatcctacgctgaagttattgatgcaaaattccgctacccgttaacggcaatgctttacgttgagttcgatagcgatctgttccagaaccagatccccactatctcactcaaaaagaaatggaagattatccaggttccgagaaactacgatccgattaatcgcacgtactccggaacgtgggacggaactttcaaatgggcgtggagcaataacccggcatgggtgctttatgacctgatcatgaatcagcgctatggtttagaccagcgcgaacttggcatcccggttgataagtggtcgctgtatgaggtggcgcaatattgtgatgaacttgttcctgacaatcgcggcgggatggaaccgcgctatttgatggatgtagttgttcagtcgcaggttgaggcgttccagttggtaagggatatttgttccgcattccgtggaatgacgttctacaacggtgaaagcctatcgatcatcgtcgataagccgcgcgatcctgtgtacctgtttacggctgataacgtcgttgatggcgttttcgttcggacgttcccaagcgaaaagacgatgtatacgtcgtgcaacgtcatgttcgacgacgaagaaaaccagtacgaacaggatgttgaaccagtattcaacccggacgcagccatgcggttcggacacaacccgaccagcattacagcgatcggatgtaccagaaggacggaggcgaaccgccgtgggcgttggattctgcaaacgaacctaagcgccacaaccgtttcgttttctactggtctggaaggtatgattccttcttgcggcgatgttatttacgttgcagatccgcactggcaatcggcctttaacctggtgctatcaggccgcgttatggaagtgtctggcgtgcaggtgttcctggcctaccgctgcgacgcgaaggctggcgacactctgatcctgaataccgacgacggcaagcctgtgcgccgcacaatcgccagtgtttcggcggatggtaagaccctcacgctaaatgttgggtataactttgacgttgcgcctgacagtgtattcctgattgagagcgatcagcttgcagcggaacagtatgtagtaaccaggattgaaaagggtagtgatgacgacgaattcacctttgccatcacggctacgcagtacgatccgaacaagtatgacgcgatcgataatggggtaattaccgatggccgaccaacttcggttgtagacccggattcaatgggcgctccgaaagacttaacgattagctcgttttctcgcattgttcagggaatgagcgtcgagacgatggtgatcggctggtctgccgtgcagtatgcaaaactgtacgaggtgcaatggcgcaaagatggcggtaactggaacaacgtccagcgcaccgcgacaacgcaggttgatatcgaaggcatctatgctggcgagtaccaggcccgcgttaggtgcattagcggcggggatgtagcgtctccgtctccgtggtctgcattggcaaccgccacactgaccgggaaagtcggagcgccaaaaggcccgattaatctttttgcatctgacaatgagatctttggcattcgcgttaagtgggctatgccagaaggagcggaagacacggcatacattgagctttaccagtcgcaaagcggaaccgatcaggacgcaagcctgcttaccctgattccctacccggcggctgaatactggcattcaattcttcccgctggctacgtgaacttctacaaagccagaagcgtagaccggatcggcaacgtttcagcatggactgattacgctcgtggtatgtcttcgactgacgttaacatcatcacagatgcgatcctggatgaaatcctggacagcgacgcgatgaaagaacttcaggagagtgcgcatgatagcgcggcaaaactcaatgactacgcgaacagcatcattcaaaacgctttggcgaatgatgcggacgtcagggttatgcgcaaggagaacggcaagcggaaggctgagatcgcgcatactaccgtgctgattgcgaatgagtctgaggcgcgggcggctgaaattacgcagcttaaagcgcagattgatgacgatatcacggcgcagatcacaacgctcaatcaagccctggcgacggaaagcgagacgagagcaacgcagatcggtcagttgcaggcagattttgcggctgatattgacggcgtaaaaacaaccatgaacgctggttttacgcaggttaatcaggctattgcaaatgaaagcgacgcgcgggcaagttcagaggcggcactagatgccaaaatcgggcagaactccgcagcgctagatcagaaactcgactcgtgggcaaacgttaatggcgtcggttccatgtacacgatgaagttaggcttgatgtacaacggccaggagtatagctccgggatggcgctacagcttacagcgcaagggagcaacattgtttcgcaggtgctgttcattgctgatagatttgctatcatcagtaatgcagcgtcgggcgcgtacacgctaccgtttgttgtgcagaattaccaggttttcattaataacgcgcttattcaggacggttctattaccaacgcgaagatcggtaacgtcattcagtccaacaactatatccccgggaaacaagggtggattatcaacaagaatggtagttctgagttcagcggcgtaactgtaagggggcacattgaggctgatagcggttcatttcatggcaccatcaacgcaaccgacgggatattccgcggctcggttgaagcaaatagttttgtgggagatatcgcggcaatggggccattcccgacgagagttgggtcggcatggaaatcacgcgtcgtgcaccatgattcaagtgacaaaggagggaaaagctacgcaattctcggactaattcgctgggatgctggcgacaagactggctctgttatcgttaagtgttatgttaatggcgtaagggtatcttctcaaacgtataatggcagagatgtaggggaatcaacccgtgctcgcctaactgctgtaggtgttgcgacgggcatcaacacgaaggatactttggttgagattgtcgtaagtgggactggcaccagcgcccttgaggctggttactgcattatgtctcgaggctccggatcgtgggaggtggtagcataaagcaattcaccaccacgctcttggtgatattattttatcagagaaagggcatacatatcggcgtacagaaaaggaaatagaattgtagtataatcacaaagcgcccgatgggcgcttttctttacccagtgatgttgataaaaagaaagtggcagaatggcccatttttatgatgctagattatccaagcctgcaaatttaaaactgctgtatcgcctcaatgccgagcgtagctcccatcccacactatagacaatatagacaatatagacagcgtttaatatgctgtatttgttaatgattttctttttcactggcgtataccgatgcatatttatgcacatctattcattcatcataaaattagtgttatcttttcacacaataaattctctggtttttactataaaaaaccccgccgaagcggggtgtgttattgccttttgtggtattaatcaatggcctcaatctcaattgacacaggatactcgtcattaaccacgttagaatgagtaccgtctaggttaatttgaaaaccttgtttgctcgtgacgctatacgtgttatcaaccagacctcctgcgttagaaatgtaaatagggccgaagtttttgtttttagcagtcgattttgaagtgctttccgcagtagtgccatttattatggtgtcggtgttagtagttacatctggaacagaatcagtacgagttgttattcctccgttattgtcattaggtatattgacaatgtactgctgctgggcggtactcgataaattacaacgtgtagtaaccttgtatcggtggaacggtggcaatccagcgacggagattaccgatttctgtcctttaaatagcttaccaatcagcttgcacttcattcccggaacattgactatgctttctccgggaagggttgggtgctgagtggctacaccagcaattatttcagcaatagctaaccatgggcgaactgttagctgagtgactccagcagttaatccaaggctggcttcgtgcttatagtttttacagtttagcttaacataacccgttgtaccagccttcttaacaaggcggcaaggctgatttccagatgtgatggcacttgcggcaaaaccatcgtatcggaagttggctgcgccatctatacgcgctttatcggctacgtaaatagctgtgctatctccgccaccttcccaccaccccatcatgtcgatatcgcagttgtacaaattatcttcacgcgaaccatctccgacagatattccttcagaagccccagcgatgccatgctggaaagcaaagttagaaattttggcaccgtaaaaagacaccgtctgccagtcggtagatgcagggtttgaatggaaccaaatacctctctttgacgtcctgacaacgacattatctaccctgataacttcagtccagcccttgtcgttgtatacgtcaatcgctgttccaatagtgtaatcacgaatcatggagtcaaacactgaccctccataaaaatctgagaatctgacaaatgcagttgcaagagcatttcctactattgagaagtttttgagcaataccgtattaaaaagagcttgtgcctgggacgcacgtttaaacgtcatggcgatgtttgcgcctgtatgcgtaataacgggtgcagcacccttaccacccattccaggcccttcaataacaagaccgttcttcgagtttatgaactccagacccccagcgatggtatatccggcaggacccagcgctggtactgaaagatatccaattgattttttaatgcaataattgatagagttagacaaaatatcgtcaagaacagccccgtcataaaggccgaactccgtcgcgcaaaccttcccggggtttttggggatgcgttgccagtaaaaagcagtttgacctgtcggaacacaggtatatccaccgtcatcaatagctgcgcctgagcgagcaacaaactccccgccaccgaatgtggcatgagccagtgcgttccacccttcataatgagacgccagtaatattcgctggcctgcatacgatggaacaacagagcgtagtgcgttaaatgattctacttgccctatgctcttgaagccattagtttgcgccaaaacaaccagcgttgactgttcgccagcattattgatgatttgctgaacttggtctcttgcagcctctgccgcctcctctgaagccttagagttattctctgaagtttttgcagcgctttcagacgccgccgcagccgcagcgctcgtgcctgcggattgtgaatccgcctttacctggttggcaagattttgcagcgattcgaaatcaaacgtcttaaagaactcgactgcatctgcaattaaggtttcctgcgactggtagtagcgcagagtttccgcaacatcttgcgccagaccgtcaacggtaagcgagtcacttaacaggatcgcgtaatcgctagacgctacggtagcgccttttgtggtgatggctttaatttcagtatcgctaaccaccttgtttacgacggccatttgaattggtgacgacaaaaacataatcgtcgcgcctgggcgaatcagcgaaagcgatgattgccattttgtgccagtcccggtaacggttccgtctgcggccatagccgctttgccttctctgtatagtgccattttaaaagcctcttatgttggttgagtaacgcagataatagcatcaatgaacagataaaaaaaggagcctttcggctcctttagttgtcaaattagaacgggatatcatcatcgaaatccatccccgtattcccgccgctgttttgcggtttaggcgcttgttgcggcttgggttgttgaggctggccccacccggattgctgattgccgccgttttgcgaaggctcgcgctggctgaattcgagttgtggcataatcatttcgttgtggctgtaaattgtgccgttgtgctcgcggttcacgatctgaagcgtccggcaggtgacgctgatcaccttatccatttgcagcgcttcgtcgtaccacttaatcatattttctttggcaaagaaaacggcgcggtagttcgtgtaaaccgtttcgtcctgaccatcacgattgcggatcttcatccgctccgacaggtctacggcgtacattttccacggcccgttattgttgctgccttcattgacatacggttcctttctgataacacctgttacaacatgcattgtcgttcctatgtggcggtttcccgcccggttaaattagttgaaagatgaaatatcttgtgcttctggttcaggctttgattctaccttttccggctcccgtttcgcaacctcttgcggtttaccagggttaaagccgttagctgtggtgactttcagttctgcctggcgtttggtgatatcgtcttccgtcattttccattccgcaggcgttaacgtttgtttcgccatcttatagatctcacgaagcgattcgagatcttcgcacgcgtcaatgcgttttttgaagtctttcggtgtcattttcgtaatttctgcatcatcatccgcctgcttgataccgagcgctgcggccagtgcatagcggcgggcgtaagatgttgttgaaccgtatgcttgttcggctgttttgctgatcggcatattgtactgaaacgccataaactcaccgctttcgtgcagaaacatcgtttcgaggtgcataaccttttcggtgctggtatccatcatggattgaatgaccataatcttattattctccagcgccggggaaatagcgtcgaggatatcaccaagattcgcataggttttcccaagatggttgttcttcccgcttttcttcgcggccacgaagccagattttgccttgattaatgcggctgcaatggtggtgaatttttcagatgtacgcatgataaagtttcctcttcctgattggtaatgcgcactatatcacaagtgcgcaccagtgtttagctatttgtgccgtatacgtccgggaacatgtatttcacaaactgcggagtaggcaaaacgacttccgccgcgtttgactcatatgatggccatgaatcatgcttcacgcattccgcatactgatgaatcacgcttttatactgcttgcgaccgatctcgatctgctggctggtcagggtgaacgccagcggagcaaacggtgattttttctcctgcgttagcagtctgacaactaccgggcgtttttcgttgtaagtcttcacgaacagatcgcgctgcaatgccatcttgagatagtaacccaggttgaaagcaagccgcccgaaatcgtccggcttggaagattgcgtggttttgtagtcggtaatcaccacgacctcgaaaacctcatccgggttgaatccccactccttgatgagttcgggatcggaaacaacgtcaacatgatctagtcgaaccttgaccttgacgccgaagatctcaccgaagattgacaattcacgctgtgctgtaggcgattcgatacatgcggcgtgtcgcgggttggccaacatcacgcttcgcatttgaacaacggcatcgaaatcaacatccttaaccagcttgcgcccggagttcatcgcggcgctttcgtcgcaaagttcaatcgcccaccaaacatttacgtcaatcccggcgcgatatgccatttccagaagttccgggtaatccttgttggacgtcccaatcaggccacacgctttcagcttcgcagacaatgccgacttcgacgtaatcagatctttaacctcgcccgtagaagtcgcccgcaggtactcgccattaaattttgccgtctcaagcatacaggtatgcgaacaggttccgaacgccagcgcggaggtttcctcacgcaccttgtatttccagtgcgccggggatgttgcgtaaatctcgccgaggcttgagccgctaacgtactccgcgcaccaggagttaggatcgtgatattgctcgttagtcaattcactgctggtgtatgccctgaaaattgcttcagccattgatattgctccatttgtggtttcgttgcgttaagtatacgcatgacgattccaggcgcaagtcaaaaagtgctatccgcagtttgttaaaaaacgagcgaaatttacgtaagatttagtaagatgcatcttacgtgatttttcctatatatttcatttggttaatgcaaatcggtaagatggtaagatccctataggtaaatatccatgaaaaatatggcgcgaaatccagcgaaaaaagacacgtacccatgagaaatcttaccaagattgatagatacagatagagtaataataataatattattatttatcatatacttactatctatatattgcggttaattggttaaattttgcgcgaaatttacgtaagattcatcttactaaatcttacgtaaagtggttcgaccagttgcaagctactgaatttcaggcataaaaaaaggtaagactgatttgctcaatcttacctaaattctggtcaacatttaatcagagaagcgacgatgccttgtacaacttacgttcaaatccgagcttaaagttgtcaccattcggaacgataactttaagatcccgatcgtcagcagccgccagcatatcacgatctccacgacggcaaactacccgcatttctcgcttaccttctccgccatttcctttatacctgtacgccacgatctcgacattggaatggatgatgcaggcccaaacgtcgcacttgaacgaactggcaatattgaagtgcatcgcctcaatccaggatcgagcaaggtaaatcggcccgttaccgtcgtcgctctgattggtcactatcacagatccgaaggtcagatcgccagctaacatcttctcgcgcccctcctcatcaatgaacagcatgttgcaatactcatcatccggcccatcctcatgcacgagttgcattggtagcgcgtgaattagctcctgtctgccgttctcgtgggtttttatgcctacctgatatgatttgatatgttcgttttcgatgccctcataaagcgttacaggcgtgctatcgacttcctccgttctgtttaaaactgccagcactctttcatggtcggccatcttgccgtagtcatacccgttatcacgagccacctgcttgtttctcttgaccacgtactcttgcggaaccttgccgagatagcgccaaagaatgttgatgcattcgctatacggctggccgcttaacttcattaaccagccaatccccttatcagcgccgcagccgccacagtatgcgccgccgtcgcctcgtgtttctaaattgtcagtccagcggaatctgtctttgccgccgcagttcggacagtcctggtgcttgccgttgaagtatcgagagtggatgccgcaaatgttctgcaacgcttcgcgccacatgccagccatgtacggcaaaacctctttttcatcgtaaaaatacacgtcgttacctccaaataaaaaactcctacacgagaatgataacccggcaggcgtttagtgtttagacaaattgtgctatcggactacgcggagcatttcccggcggtcgcatcggcgcgtaactggcttgccgttgctgtcaaaccttaaatctggtcggcagaatgaggcgcggaaacctttgcaattgttccggcggtagctcttgtgtacgagataagcgccatcggctgagatcatgccgcgcttacgccactgctgaacaacctggatgctaacccccaactcttttgccgttccagcgatgccaccgaaggtggcaataaccagctccatccgcgcagtcaacccggctcgaacctcatccttcagcacgtagtaaccagtaggtcgcttgcgtttcttcttgtctttcccgcgcgatgttccgttgttgccgttcaaggttcgcttatcaacctttgccatttgttccataatttaaccctcatagcattttttgttaaacctgataaaatgttccatgtattatacacgcaactatgcgaatgacaaattaggattgcccatgctcacaattgaacaacaaattgaagcctacgcagacaagatcccgttaatacaaaatcggttcaccgtcggaaatatcgttccttacccgtatcaggcggttgcgtatattgagaccgcgaagcggatcgcaaaatatgaacatccgttttacattaaggcttcggtttccgccgggaaaaccatcatgatcgccatgctcgcggcgcagtgcaaggcaatgaacttacccatgatggttcttgctcgccaggccgagatcgtgaagcaggattccgaggagatcagtaacctcgacgttccgaactccgtttattgcgccgggttaggcacgaaggccgcttacttcccgatcgtcgtcggatctgaagggacggtggttaatggcctgtttaaaatgctgggcgactacgtgccttcagttctggccattgacgaatgccaccaggttgactggcaagatctggcggaagcgatcgccaacaatgaatcgttcgagtacatgagcaggccgaaggataagccgtatcgcgtgaacggtgaactggtcgatgccgaccacccatatgacgaaaaattcgacgacgtggaattaggcggcgggcgcactcaatacaccatcgtaatcattgagttaatgcgccgttgccttcagaagacggggcgcgagcttcacattgttggctatacgggttctgagtttcgcggcgtcattccgatcttacaggaagacaagagccagccgggtttctggcgcgagcagatcaccgacattaacacaaactatcttgtcgagttcggatcggttgttcccaccattttcggcgataccgaggcggatgggttagggtatgacctgtcagaattccacggctcaagtcaggacggtacgcaggattttagcgcggaagacttgcgcaagatggaaaagaaaatccatgaatccggcgaaatgactaagctgattatgcaaaaggtcgtggagcgtgcgaaaacccgaaacggcgttcttattacttgcgctggccagcggcattgcaaggaagcggcaagctatctaccgccggacgcaacatacgcgatcatcacagagaagacgaactcaaagaaacgcggcgaaattttggataaggcgaatcgcggggagattaaatacatcttccaggtgatggccctaaccactggcgttaacgttccgttttgggatttttcggtgatattgcgcaagatcgggtcgcttacgttgcttattcagcttttggggcgtggaatgcgacttctaaaggactggcaaaaacagccgccttactcgtgggttaaggaagaccatttagtttgggacttcgccggaacaatggatgacctgggccagttgtatttcgatccgattttggagcaggcgcaataccaaaggcgcaagagcagcaagaacggcccgaaaatttgcccggtatgcaagggagaaaatagcgagtacgcccgccgatgcatccacaaagacagcaacggtaatcgttgcgaatacttctggatctcgcagcgctgcgaagaccagaaagacccacgaacagggaagattaaagtaaaagggtgttacgctgaaaacgatattgttgctcgccagtgcagatgctgcggggtgcagcttaaagaccccaatgacaatctcaccgggaagcactacacgcagaatgactggtatgatgttgtcgggttcgatatcggcttgactcgcaatcagtccgggatcatcttcaattacgtgttacttaaccatgacggcgagcgattcaccgcaagggaaaagttcttcccggaatcagagaatcagatttgcggcaagttgtggcgacaaaaggcagtcttccagcacgttagcgacgcggtaatgcgcggcaagctgggcggaatgaaaaatgcgcgaaaaatccttgagaatgcgcattacttccgagcgccgaagcgcgtaactcatcgcgttaacggtaagaaggaagatattatttcacgcaaagattttggagacgaatagtgattactgataaaggtgattatctcgaatactacggcgggcctgtaaaggcttgcccgcttgagaaaatcgatcagatgaatagcgtttcgtggctgcggcacgaataccctgattatctgttctggcatacggttaacgaagggagtaagcacaaggcgagcgcggttatcgatcatcaaatggggttgctgaagggcgttagcgacattctgatcctgattgggttcggcggaaaatacccgttcgcggccatcgagctaaagcgccagggcaaggcgcaggcgtcaccagtgagcaaggagcaaagggaattccttgctgccgttcgccgtcgcggcggattcgcagccgtggcctatggcttcgagcaattcaagatcgctttctgcgatgccatcaaatagcactttttgttaaaacatcccggcgaaagccgggtatcatttcaccatcgaaacgaagaatggagtgttgaaaatgaaaaagattctggctttagttattctgtctcttggtattattggttgcagcgaaaaaccgaaaacatatgattgcggtcgtgaagcgtttgaggtgactagcaactatatgaaagttgtcaagggtgaaaactctggcgttataattgatggcgctggcgaaaatcaatataaactgtttactccttttgggtacgctcattatacagtcaacaaaaacactattgacgttagtgttggtgtttttcacaatacattaacctgcgaggttaaataataatggcaaaagatatcgcagacaaagacactcatgacgcattcatcacgtttgagcaaatcgagcgcgagacgttcatcggtaacgcgctggccactggcggacactaccaggctgtcaggacagacaagttttaccaggttacgggaaaccgatacgccgggagcaaaacgcctgatatcgtgcgcgataaatgggcgaccgatcgcagcctgatcgcatacatggaagagcgctatggcccttacgatcttgacgcagcggcagaccaaagcaacgcagtttgtgcgaagttttacgacgaaaaaacggattgccttaaacgctggtggggaaaaaacaagcacgtttggctgaatccgccttactcgtttccagatccgtttattctcaaggccattgagcaaatggagcacgacaaccagatcgacattctgctacccggcgacaattctaccgcctggttccgtgacgcgcagaagatggccgccgaaattatctggattgttgcggatgttgaagaggatgatgacgggaaccagttaagccgatctggtcgccttgccttcatcaacggattaagcgggaagccagtcgacaacaacaataagggaagtgttattttcatcatgcgcaagctcaagccgggagaggagcaaaagacgctttacattccggtaagcgagatttgcccgtcattagctaaaaagcgtatgcgcaaacgtgggatctgaaaaatggaacagatagagtctttcgccgagtatcttcggatcgttgttgaacttctggataagcacggattcattgggacggatgaggaaaagttagcctttgctgacaccatcgacggaacctacatggagttcatggacaacggaaccccggccgctgactggccagaaattcttgaacgagaattgattgagtttaaatcacatgaaggcgcggagtatttcgcaaaacagcactaattgctaaacaatacccgccgcgtgcgggtattattacaccatcaaccaatcaggagcaaacgccatgaaaacaaaaaccattgcagacaccatcaagatcgtaccagcaaaagcgcaagtggtatctcgccacctggttaacctttctcgcctgtgcatggccgactacatggcgaacccttcagagaatggccttgatggtgtagtcggtgagatttattttcgcgcagggtacggcctggaaagtgtggccatgtatgagcaaatggccgaaggtttttgcatttacggtgacgaatgatgattgtcgagactggtcgcgctgccgtatggcagcacgctaaagaagcaggaataagtgatgatatcgtgaagatcgcaaagtatttcgatataaaggatatctccatcgtgttcggcgggaagtttacttacctccacgagcgcccggtgaagcgcacgcgaatagcagtggcaacgcgggcagaggccgacgcgctgaagatgttcatccacgagtctaagcagcagaagaaatattacaagtagcggggaggtgaagaatgcgatatattgcgatcttatttacggcgattctgtttacgatcgcaatcattaactatgcaattcaattgggataaattatgtcacctaaaatcacagacgaagaatttttagcatcacgcgaggaggggaaaacctaccgcgagatcgcggaagagttcggcatgaacattcgaagcgttgaacgtcgcggcgttcgcctggcgcgacaaggacacctacacggaaacgcccatgttgcgaagcatatcccggacggcttcggcgtaaaaggcacttcgacgatgattcgcgcggacggctccgaggtcgtgcggtgggtcaagtcggaagtagaccgcgatcgcatggtctcgcttatggaggcagcgcaggcggctttctgcgaagaccttccgcgagccgaaccgcaaccgctggatgaatcgaagttctacattgaagatcagcttgccatgtacccgatcttcgatctgcatattggggcgatggcgcataagcatgaatgcggcgagaactatgataccagcacggcagaaaaggttctaaaccgcttctttgattattccgtttcggttgctccgcaatcacaaaaggcggttttgttggtcggcggtgacttccttcacagtgacggcctggacgcagtaaccccgacaagcggtcacgttctcgatcaggatagccgatacgcaaaacttgtttatgttgccattcgttcgctgcgtcgcgcagtgtcgctactgcttaacaatcatgcagaagttgaagtgcaggtgattgaaggcaaccacgaccaggccggtatgatttggctacgcgctgcgctggcggcgttctatgagaatgaacctcgcgtttttgttgatgttagtccggctatcctgcatcgcaccttgtggggcaaaaccatgctgggctatacgcatggccacacgatgaaaaagcctgaaacgcgccttgctgcgatggctacagacttccgtaaggagttcggccagtgcgactacatttacacgcattccggccactggcatcaccagactgtaacggaacactcgttaggcattgacgaagtgcatggccagttaggcgcaaaagatgcctacgcagcacgcggcggatggcgttcataccgccaggctgcggtgattctgtacagcaaagaatatggcgaagtaggtcgctttatctatcgcccgaacatgtaacaacaacggcccagcgaggggccaataaggaaaaccgatgaatagaaatatctgcattttcgatctcgatggcacgctttccgacggaacccaccgcttgcacctgctgccgaaaaaagatctccaccttacagaaagttggagcgaatttaatggcgcgtcaattggcgacagtccaatccaaagcactattgacgtggcgaatgcgctttatcgatccggaatgaccgttatcatcctgactggcagatccgatgaggtgaagaccgaaacaatgatttggcttgaccgctacggggtgaaatatgacagcctaatcatgcgccgcgccagcgataaccgtaaagacacggtaatcaaggaggatgagttacgcaaaatcggacttgatcgcattgttgcggcatgggatgattcccccaatgttattgcgcacttgcgcggcctggggatcacgacttaccaggtctgcgactacggcgacaatcttcacgatcatttaaaatcacacggagtagacaaatgaaaaatgtaatcatcctcaacggagcgcctggcatcggaaaggacactatcgcggaaatcatctcgcggaagtggcaatacaagaaccttagcttcaaacagccgatgtttgccattgctcgtgctgtgctgggatctactgattttgcacgctttactgccagataccacgaccgcaagcacaaagaagtgaaatgcgattttttgggcgaccgttctccgcgtgaattcatgattcacattagcgaaaatttcgtcaagccgaccctgggcaaaaatcagttcggcaagttgctttgcgattcagcgctaacctcgccgtttaactgcatcgtcagcgacggcggttttgatgaggaggtcgagcacgtcgcagcgcatgaggcgcttaacgtatttgtcgtccgccttcatcgtgacagcatgacctttgagggtgatagccgcaagcatattcgacgccaggatcttatttgcgacacttaccatgaactcgattttgatatgaccactggcgagccggaagacgacgcgcaaaaaatccttgatatggtgtcagatgttgcattaaaattataaagttaatgcctttattatcaccaccttaacgattgggaaccttgattggttcccttttttttgttcttaatttggcctaatgcatatatcatcaccttaccatttaactaacagaggttgcatatcatgcgggaattcatcaacgcggcaaccaatagcagcggtggcgttgccctcgcgggatctgcaaccgggcaattaatcattgctgccattggcttatttttcatggttctattcggctccttcggcgcgtggttgcgctggcgagattcaaaggcgcttcgtgaggcgctggaagccggggatatcaaaacggcggtgaagatcaggagtaaataacatggggattaaaacgcgggttacattcgcggcggcggtggcgatcgcggtcgcgttcctccccaaagtggaggacacgaaatacaaggtttatacggatatcgctggcgttccaactgtatgcgaaggcatcacaggcccggacgttatcaaggggaaaacctatacccggtcagagtgcgacgcgcttttgaccaagcatattcaggtggcgaagcgaaccgttgacagcaaaatcaaagtcgatgttccggacaccttcagggcgtcgatgtacagcttcacgttcaacgctggcggcggcgcatactctggcagcaccatgctgaaattaacgaaccagggccgattgcgcgaggcgtgcgagcagctatatcgctggacgtactaccgcaacccgaagacgggaaagatggaaaagtcgaaaggcttgtataatcgccgggttcaggaatatcaactatgcattaaggatctgaaatgagcacattaaactttcaacgagcgctggccatcggctttatcgtgtgggcggctgccgtcgtttccggttgcgcgtcaagcgtcccaatcctttccgatctggttggtagcaagcctgatatgacggcgcaagtcggcgcggagaacgtgaaacaggcggttggcgtgacgaacaaaacggacacgtcgagcaagcaggagaccacgttcaaagagtcggcggtaggtaaggttgacacgtcgaacaagaaatctgtaacgacctccagcattcacgccaaccagattacggcggacaagatcgagatccggaatgatgaaagcggaagcctgattccgtggctgattggtggtgttggggtagtaatgctggcgatcggggtgttcggtctttggcgtgaacgaaaaaacaaaggggcgtaatgcccctttttctatatgtaccgcttgacgtgcaatagcgctactccgtcttcatcgttaaggccatgttcaacagtgttggttgcagccattccttgatagagcaagatgagcgcggcacgcaagtaattttctggtgtgatctgtttcacgcaaacaagcctgtgaacttcagttatcagatcttccacctggtttcccgaaaagctgttcatcactgagttggtcaaggtgcatcatctcccacatatatctgttatccatcccttcgaacgaccggaaatcaaaacctatctccctgttatccggcccagcacaccacacagcgccgttttttccgtcaaggtatccattcgtatagcttcgcgccaaaaactccttagagaccattgaggcgaacatgcgttgcgatacgttggcggcttttgccaggcgaggagcttcgcggtgcatgtagacgaacttcgcaaaatcctgccgggtgaactccaggcgagattcgcagaacttgtaaatgtcaagaatgaacatcaattacctcatgaacgacgggttgataaagacttcggaatctatcacgcagataaagcctaattcctccatcttcggcaataagcgttccttaatctttttgctcaccccggcctggcctttgaagatcttcaggttgcggcaggcgttataaatgccctggacggtcataacaccttttgcctgcttgcaacgactggcgataacgtcatacagcgctttaatttccgctccctcaccagcaaagccggaagagtcagccgatgacaagtaagttttgctcaattcatggaacatgatgatcgcttcgtcaatggttgccgtgtcgatcttcttcgagcgcttcccgcctggttgccagttccggatcgtgtgaatcacggacgccagacgcataacctgcttatcaaacttacccatcgcgccgcgaagcattgtatgcgaatacttaccgccgtcgcctaactccggttctaactcctggcgggccttattcagtctccgcattgccgcgtcagtaacctgcaacttaatgttcgactcgctcataatgtcatgaatcagccggaagtaatccgccttcagtgactggtcgatcggctcataggtagaattcccgttttcgtcgatgaacacgcgctcacccaaacgggtttgctcacgaaccaaaaggaaacgctccgagacaccgatcccgcgagaacccgcttgcatgatggcgtcgatggtttcatcctgtgcaattacgcaaatgcagcccaaagcctcgaatgacatattgttgctaacgtcggcacgagcgatcgatacgtggcctttatcccatgctttgagcaccagttcgctgttcgtcttcttgccgccatcgttgccatacgtgatccccaaaaggctgttaaccgccgtcgcctcatctgaaataacggcaaagtttccctggcggttgttaatcttcgccagaccttccggggtggtatcggataccggaaaagttagatcacataatttttcaagtttctcttccagttcgtcacgatcttcgaaaagtttcaccatatcagattgcgacaactcacctttaagcgcctgcttgttggcggacaacttcgccatgattttcttgcgctctttcttgcgcaactcgttaatgcgctcgacttcggccacgatcggatcgatggccagcgagttaatggcagacttaccagcggaaggcggctgcgacgtgatgacgtaaagtgttgtcggttgctcgctgccgtggtactcgacccaaaagcgacccatcatcgcggcggatacggttccgataaagtgcatgtaagcggatgattccgggaactgaacagaacgtgctgcattgagcgccagcttgccgaccacatcgtaatcattggcgatcgagattgttgggtatttatccgcgtttacgtcgatatcttttggctttggccagaatgaaacggagtcacgatacccgttcgcacgaatcgcaacgcgcagtggactgattccctccctttctgcgatggcgataatatcttgcggtgatacgcggtcatttaaaaacatgcccttgctcctgattggttaatcgttcggctaatcatatgccgtattaaatccgagatccagtgataatctaaacacgcttgaaaaacgcgcttggattatcggggcgcatggccccgaaccagtcacaggtatttagcttcgaaagtcgttccgtcagatacactgaagccaacctcctcgcggtacagcgtccagcggcatccgtcacggtcgaagatgtagccagcaaccgcaccgagcgcacgaccgctttctacctggtagcgcttaccgacgctgaaggattttttcatctggttgctatgatcaaggccgacgcattttagcgttttggttttgagttcgatgaacgtcgcaaccgccgcgccgccgtcgccagcaataaacaactcaccgctaacgcctaccgacaaaataacgcgcttcttcttcagttctacgctgtcatataccatcattgacacgttgccttcatcgtctacgcgggcggaataaaggttgttttcatggatgttaacggcacggcttgacgtgcatttaatcttgattgacttcgccatttattttctttctcccatctcgatatacaggttaaccagatccagaaagtcagctttatttctgcaactcaatttaaagccaacgtgcgactcaattttattttgcatcgcagccaggtttgcgcctccattattcatcctgagaacttcgcggcatacttcggcgagttttttcgatatcattttttcaccacctttatttccatgccttcgcaagcggccttgatatcattaatcagccgattaatccttaaatcagtcattacatggtgatgacgaacatcaataatcccggcaacgactaacagcatgacggcaaagataaaaccaccaggcccggacatacacaaaatagttaacatcatcaagataataaatttcatttccgtttactccgttgcgtttctatggggtaatgctacccgactttcgccgggtagttttagcaattcgtgctattctcgataattcgcctggaacacggcgcgggcaaaacctcgcggagtaatggagcgcagcattttagtcctttctgaccttccgcccaaaaacttccaggcccaaaagaaattcacgccttctactccatccggcggagggagccttttcggttcgacaaaaccgtttccgtgccatatgcacgttttcttcgtgtaattgtcacagtggggcatttttggatgccacacaggttcgttcggagaaacatagccgccgaagtcgcgcgggtgaaaatagaaatccggcttgcgccatagtgacgacaattttccaaccgggttttcgaccatccaggggcaaccatacttattgcctaattgctcgaccatcttcgcatcatctgcggctgatagaacgtcattatcttcccttacgtgcttgattccgctatgcgctaacagcgtgcatgacgggaaggcgaaaatgaagtcaggatcgtgaatgccgagaatcgatcgcttcacgtcaaaatccttgtcaatccaaatgttaacatactggatattttggtgaaccattcgaatgctatattctccgtggtcgccggagtcggcattgaagcaatacaccttgcatcccttgatggcccacggcaggcccatgatgcctgagccgtcgaacatgcagtaaataaccttgtctttcatgctttccacgcctcaatgaacattctgttcgattccagcgtcagcgtgacgccagccagggaggactgaacgaggcgaccgccaggaaccgtcccgatgatgtagcggcctttcgacttcgtgatcgtgatctgagtgaagccggaggcgcggttcatgcggagaacgacgcggccatgcgcgttcaggacggcgagaatggaatcagtcttcggatggttcattgtgtagctccttcgcttgttggtgtggggatagtatgccactatcccgccatgttgttttagcaaaacgtgctatgccggaacgcaggtcgcgtaatcctggctgatgtagatcgtgcgctgaacgcggggttcattttcgccgagttcctggatggtaacatcgttgcttccgacccggcacgtaaccgatccgaaaataaactcgccagtctgcttgtcgttgatttgccatacattaccgccttcctttttgaaaaccaggaaaggcgcgttttctgcgctgaactcttccgggccacgaccgtagtaatgcgtgatcgcagctttggcggcagcgctgaaggcatcggtaacgtcattggtcgccttgtcgcggatggccttgacacgctcttcaggcgatccgatgatgtaggaaaagctgttcgaaatggtaactgttcgcattatattttaacctcgttttggtggatgaagtcggcgacgtaatggcattcgatcggattctcgatgcccgccagcacctcgcacgacccgttattcagtagctggcaatgctggcactccgcgccgccaacactggcaatgacaatggcgatcccgttgcatgaaccgccgaacattctgtgcgggaaggggtaagcatcgcaggtgcaaaccacctcccaggcccgccgttttctcatgatccccgcctttttctatgaggagtacccaatcaactccctcaatttactgctttgatcgcatgaaccaacagccataactaaacaaacagaatcgtttcagattctaatttctcattgcacgtcttgcgagataatcacaccgtgcaattgctaaatctaactgacgatatgaactgtcacttacactatgtgtaattcctgagatcatcacgtgaaaaccatctttgttttttaatacccaaaattttccattttcatatgctatgtctttctctttgagtctcattgctccactccactcaaattcgtttcgttgaagtcatcatagcaaagccgacaggatggtttttaacaaaaaatgctattcctgcgattgctgattattcaacctattcggaatagtggaatagtgcgtgattgcacttgattcccaggtgattagttttgacgaatcatgattgcttttgattgtttcattttgtgcaacgatttttgaagtgtttcagtatttgcaacgaattgcataaatgtatgcaccatgcacgcaatttgccgatcgaagcctgccgaaacagtcatgtttgtggcggttattgtggttgtgtatggaattgtagttagtttgtcgtaagattttgcttaccggaaaatcgtgcaaaaagtgagcaacaatcatccataagaaagtagatatatatataatatataaagagtttttactcttattattattatatacactcccacccctcccctttgtggtaagattagtaaggtatatgcataccctttcgcttccgcgtgaaaatcttatttgttccgcgcccctccctggggatatataaatgggcatatataagggggttgcttaccgggccaccacaaacgcgcgcaagccaggcgtggcaaggcttccagtgcgtaagatgcatcttacgacaatctaaccacaagcaaacacagcgcaccaatattgacaccaaaaacaggcgtgatactatgccaccacgaccagcaaaaggagaaaaatcatggcacgacagaaagcagaagaccgagccactatcaacgaccctgacgagttaatggccctggctcaaaaggcggcgcggcgacgcgatgaccagttcggctaccgcgagggcagggcaacctgggagaccacggagcaaatcaatagccttatcaaagaggcttacgatgaaccctggaatggtggcgaatacctgcgaatgcgctttgctacggcagggcaagatctgaagattagcgttgacgagtataggcttgccaccaggggaagtggcctgtatgactccacgatcaccagcagcctcaaaaggttcgttactcacggcaagcgaatcagtaggcgctttgttgatgggttctatcacatcaagatcgtggatgacttgtcgaaggaggcagtgacgaagagtcacgatgaatcaatccggaaggaggagcgggaaagaattaagggattggtggccgctcttgccgtagacttcgcaggggatgccctgaccgggatttacaaggcgaccttgttcgcggctatcgatcttggattgaacgccagcgatatcagccaggaggccagtcatgaagagtaagacttcaatagcccaaacactcatgcggcaatataggggcatgataaaaacaatggatcgggttgcactccagcaagctgtaaaatattgctaccgtgcgcctgactcctggacttacaggttcaaggatgactctgtgttatggttccataaaggtagcgcaatcatcatcacaaaagaagaagcactaaaactatggaggagagtatgaagctatatccagaccaaaacgaccccgcagcgccaatgcgccttggcgacacgccaatcagcgagcaggaggttatcgcagccatcgccactgcatcggacgacgaaaatccaaccgccctggaatgcgttacagccgacttgctgttaatgtcatttcttccggaatcttaatcctacattcagcacatcaccgagactggcgaggctgttacgaaaccggaattcatcggcgcgtcgaacgtcctggccatgatggccgatgaggccgacaacatcattagcctggattatccacaatgagcgcctttatcctgttttccatcggtgttaattgcggattgctcctggcggcatttatcatccacctgagcaacaagtagcactttttgttaaaacccggtcagagcgatcgggtattatctcttcatagacaacgaaccgaggaaagcgaaatgattactctgatcacctgggaacacgaaagcagtaagccagaagtgcgcgaattcgagaccgtggcggcgtgctacaacctggcggcaaacggtggattttacaaggcgcagatcgttaacgagttcggggttgtcgattatgaattttaaggcgagcgatgtaaaacctggtgcggtctacggatcgcgcctcaacaaccgcctttggcgctgggatggcgaaactatgtggactaaaggcgagggcgatgttatttggcatgggtgcggctggcctcaccacacaatgagccgccttgatatcgcttattatctttcagttggcgatatgcacgaggtggaaggatagcactttttgctaaaactcgaacggggcaatgcgatattattaccccatcgaaacagaggagcaaaaacatgattggcaaccacaacaacgaactgaacgcagccgcccaccgtcgcgccgtcgagcagaacttcaacgcgcttaaagtagcctgcgatgagatgaaagcaatgcttgaactgccgtcatgggaaccacaactcgaagactactatgacggcctcagcgtcaagcgtgacgatatcatcaaccgcctgcgcctggccggaatgttcctgtaaggagaacgcaatgattcacgaaattaagtcaaaaaaacaagtggtggcaaccctcaagaagaggagggttgttgccttccagcttaacattccagacccagacgacgcgcggtcgattgacgtgccgattttggccaacacgatcgccattgatgacgatggtgcaatttgggcctatgagtctacagccgaagaggttagcatttttgaaggccagggtgaagcatggtgcgacgtagggaaggccaaaaacaggctagaccaaatcgggacaatggctcgcttccatgattgggcaaaatcgaagattgaccttcgcggcatgaaatagcacgcattgctaaacgccaggtcagatgattgggcataattatcacgaagtcgattaacgaccaaattatgcaaggagacagaagaatgcaacaatttgaatctcgcggcaagacctacaacctgcctgacactgctacccatgccgcccctggtgtgtgcgtaggcgtatactttaaggatggcgatagctggtttttcattggtgatgttattggggacgtcccgccgaagaaatgcggctcactcttgggcttctacgatcacgacgtggtggagttgaagcaaaagcgcgtacctttcgctttctggaacaaaatcaaaggggcgatctttaaatgaaccaattcgaattcctggcgcgagcgcacagtgcgcttgcaatgtacgccttcagcaagaacatgaagattatcagtgttgaggttgagttcaacaatatcagcatttccggctatgtgggcggctcgtaccacgttacaaaattcatcttcccgtcgctggacagcctggagcgtgaggcgctttgtttctgaatagcactttttgctaaacgcccggtcaggagatcgggcataatatccatacaccaaacaacggagattcaccatgattcgcactaccagaccgctacccaataacctttacgccacgattgggtttcgcgcggtgagacttattcacgtcaacgaagttggcaacgtggctattttgtggtttgagcgccactcaagcggggttggcctgagcattcaaagattcgggcgctttagcggcatcccaacaacccattctcattgggttgatggctcatactgctggacgcacgttaagcacgtcgagaacttcgacgccaaatcactgagcgatgacgacgcctggaagatggtaacagacctctttgggtatgatgcctgcatggaggtagttggatgatacgtttatcagaattcgatcgccactgcttaaccgggcaatttggcgaaaagccagtaatgtgcaagatctcgaagattaagggcgagccgtttgagcaaatcaggacgcttgtaagttttgccagacgaaaccgcctttacatccaggcgcgaggcggactgttcgcaaagcaggttcattttgcgtatggaacatggttctacactggtggcgacggggttaacccatcgccgaaaagggttaggctgcgcgagataatcgaacacggctacgtttggactaacgggatctactaatggaaacggttaaagtaatttgcacgcacgtcggctattcgccgctatccacctatttcacacctggccgcgagtatgacgccaggttcggccccggccttgatgaggtgtggattttgcatggcgaccagggaaccacggaggacgaagaattctggcccgcctgccgtatgccggacgaaaagatcgcaatgtacgccaatatgccatatgaaaacaacgttctatttgaggtgaaagtatgaaagtaagcaaaaagaaactcgcgctttattgggcgttcttccttggcggcctggtactgcatgatcacgtaggctggcagacgatcggaatgctgtgcatgattattggcgtatgccgcctgtcggagattaacggattccgccgtggatatcgggcagcgttcagcggcgaaaaagaatagcactttttgttaaaactgccgtaacgtcatttgataaagtggcgttactgaagtgaacaatccaatcaggagcaacgcaatgaacgacaatttaatcgcactgctggaagaactgaattcctacggctgcgcatacatcgagctttcgagcgagcaggttattgaagtcgcaatcgacgatgacgccgggttcaccagattaagggtggcggcaggggccgaagaggaattcgaagactgcggcatccgtgaagtaaccaaccttctcgaatcccaccaggtgaaggagatccgctaatgaaaaccgtcaagctaatggttgtcaatgcggcccgcgaacgtgagcgccaccttatcggctgcgtattcgatgccgtcgaggtaaaagactcaaaaggagactttcacgtaatacagggcggataccttaacgaatttatcgtcaatccgctggacactgacgaagacttgaccatccgtgttggtggcgagccggaaaacgcgcttttccacctgcggaaagtatcgaaggcgtcgcagcgcaagttgctggttcgcgcactgaagcgcattgcgaaggagcgcggatacacagacgcatacatccgcaagttcggcacgttcgctggcgtaggcgattgggcgcggtcatgggccgactattacttcaacaaatccggcgaattctgttcagcgcatacggactggctgcatggaaccgaacacgatccagttaacggccacgagtggtacgaattcattgaggcggaattagacgccatttgatagcacgaattgctaaaacgaacgtccggggatggtgcatactatccccacactaacgaacaaaggaaattacccatgaacaaaccaaaaatcatcctgatcccgtccgtcgattccgcggttaatacttacgcgaaattcaccaaaggcaagcgctataccgcaaccgcatttaccaaatgttccggcgaaatgctttacaatgtcagtgatgactacgggcgcgagtatcacgtaaacccaagatcttcgctatatcttggtggccatcgcttcgatattgagtatccgatcgaggattgcagcaagcgcgagtcactaaccattaacgcggcaaccatcggtgacgggttcattagccgggcctgcatcgttgacctgataccgtccgacaatcacaccaaagacgacgccgacccgctgtttaaggcagttgttcgcgccggaaccggttgggcgttaagtgatgcgtcgtgcgaatcattcatgcgtgaaccattctcacgaatcgcggaacttgaaaagcaggttgctttcctgactggtgaacttcaggaggctatcgccacgatcgagagggttcgggaaatcatgcgcaccgaacctggctatgatgttgaagatcacgcgcgagttttgcgcatgatggccgacgctttcgcaaagctccagcaatagaacgaaccacaaacacgaatcttggttgctgcatggcaacccaacaaaagacaaggaaaaacatcatgatttacgcaattattgccctggtggttcttattccggccctgtatgcgtgcggctgtttcctcatgcgggccttcctgaaatcggcggattctaccgacaaagaagatctttatcctgtgctttgctggccctggattgcattttccgccgttggcagcgtgattatttcccgcaattttaagtggtgaggcgatacatgaatatcaaaatgtggttcaacggctttacctacaacgtgcgctttcgcgggaagttctattactggtgcgatgagggcggaaagcgctggcggattcgcccgcaccagaaaggcgcgagttgtgagttaggcattgccgaggcgcggggtcgcgtcgagtgggttaaactgaaagtcatggatggcctgccaaatagcacgaattgctaaaaccgatcagtggtgagctggtatagttaccccatcgaaacgaaacggagttacagcaatgaaaatcaaaatcaccaaaatagacactcttaacggcgacggctcaattaccctggaagaatgcggcctcaaaatcggagaagttcttgaggtcgacggacacttcaacgacggctcctactgtgtgatcgctccgcgcaatagcgaatttatccaggctggtgacaatatcagcgtgagcgaagacgaatgcgaggttgtggaagaatgagcaacaaaatttgggtactgacctacactatcggaaccaacgaggggcgcaagtcgcgccgcctcatctgcgacaccaaagagcaggcgattatgcagcaaaccgttcttggtggcgatcttgtagaatatttccgcaagcctgaagcgtttaaggtgaaccggccggaaggcatggatatcaacggcgcgttagcgagcctgcgtgagatgcagcacaacccgaagacgtggagcgactttcaatgcctgcgggcggagccggaagtgaaggccgacccgttcaccaatattcgggcgcagcacgcggagtggtcggatcgccagtttggcaacgttgggccagtcgggccgctcaaacgcctggcgaaagaggcgatcgaggccgccgaagcgcctgatgacattagcgagttcgccgatatcctcatgttggtatgggatgcaacgcgccgcgccggattaagcgatgagcagttggctgaagcggtggcggaaaagctggaacggaacaagcgccgggcgtggggcgaggtcaaagatggcgaaccttgccaccacgtgaaaaattaacgaaatcgaataccgtttaaagcgcctgcaagccattctggcgggcgcaaatttaaggagtgctattgtatgcctgaatactcaaaagtcgaagatatgccgattggagcaacgattacgggtatatgtatgagtgagtctgtcgacgcaatcaagccgctggcgttcccggttacgcaggtggagacggatagcagaaaggggttcatcttcatctacaaaaatttcaatagtccgctgcgtgttgaagtgttcattgctcgcggaacctgggtagaatgggagaaggacaaatgttcggactgaatgaagcgcagtacaacgccgtgaagcgcatagcaaagcagatggccgcagaaacaaaagacgccatcaagaaggacaagaagacctacgatcaggtcgcagcgaagatgatcgataaacattgggcgcaaatcaacacgctggttactcgcggccagttcatctggatagctggctacctggagggccgattcggtcgcagggatggcgagtacgagtgaaaaataagcgaacgaatcaaccgcctattgacgcactttcgctgaccgggtatagtggtcacgtagacacaagaggcggccatagtccgcaagtcgcgccccgcttaggggcttttattgaggggttatgatgcagtacaaaatcatgctcacggcaaggaaaatgggtggcttttgcaaatcctgcattcaagagttcagcatgacacttgaggcgaacgataccgccgacgcggtggagaaagcaaaaaagagatccggcgttaatctggatactcacaaaatcaacataaactacataagggaagttaagtaatggtaactctgattgttgcttttttaatgcttgtcataggctatcacgttagcgcggttcgccttgttgagcgcctttcaaagcgggtacatgaaggcacgtttgctgccatgatgtacaataagaaaactggacgttgggaaaaaattggcgatccggaaggtatcgcaaaacgaattgctttttcgccgcttccgtatgttgactgtgagccatttgtgaaactccagaagacgctgaataggcgcaataagctgat

SEQ ID NO: 66 - DNA, 48238 bp, unidentified
  source 1..48238: mol_type = genomic DNA
atgggggaagaaaaaagcgctacgcagtggctgcgcgtttttattctccccaccatgccgtataggggtaaactggggcagagccacttgaaagaggaaaacaacatgactgataaggtgaaggtaacgacacctcggaacccagtcggcagaccaaccagctacaccgaggacatgccggaaaaactccttgaatatttccgtgtcgacgttgatgactatatccagcactcacacacgacagccgggaaaagcaacattcgcattaacccgaagcacatgccgtctattctcaacttctgcgaaagcatcggcatcacgacgacaacgtttcatgactggcgttcgaagcataaggaattttctgtcgcttacacgcaggcgcgcgagctttacgagcagatgattctgaatattggcttcgccacgaacagcactttcgcgaccttcatgctgaaagcgaatttcggctaccgcgacaacactgagatcgtcgtgaccggtgacgccaacaagccggtgcggttgaagatcgtcagcgagcggccgaaagatgagaagccgcgcgaggagtccgaagccgtcgactggggtgacgactaaatactgcttgacatatctatgactgcgcaggaatatggggccgggcaatcctgcccccactgcacaggacatcaaaatgactgaatcactgaaattcacctccccggcaccggcaccagttagcggcgttctcgcttgcgcttcccgcgaggcaggcgcagaaaataacctcaaactggcgcgcgccatcgtcgtcgaggtcgcagaccgtggcgctgagcagcacgtgaaaatcaaagtcggcaccctgcttgccctggcgctgggccttgagggcgtcatgaaggttatggcgtcgcttgaggctgatcgcgacagcaagatcaaggcgctcagcgagtgggaggtgttcggcgtcgaaatgcttgagcagaagttcaagtgcctgccggtggtcaacatgaagccggaagagaagcgtaaacgcattgccgctggtatcgacacgctaacgcagcgactcgacgagcgcagcgaagacctggctttagtagatggacagctgaacgaatggcgcacgcacacccggcacgtcctggatacctacttcgccacctaccccaccagcaactccaacgaccggaatcttcgcctaatcatgacggcggctatcgaaagcgcacacaacaaaaacaagcagctgaacaaggactataacgccatgcacaacagagcctacgcatcagaccagctgagggaggccgcagagcgggagcgggacgatgtgatcaacctcaaccgcaacgcagcggaagagatcacccacttgcaagaacgcgccaaacacctcgatcaaaccatcgtcgacctggtgcgccagcgcgacaagaacgggcagcaggctaaccagctggctaacgaactggtcgagaaacgcaaggagatcagcaagctgttagaaatcattgaccgcctgcacgcagagatcgcagagaagcgcgacatcatcggcgcagcaacgctgcgctgcactgcgctcaccaatgacgcgaaggcgatgagcaagcataacagcgaactcgcagcacgcctggctaacgctggtctggagatcggcagctataagcagcttgtggaagacctgaaagtaggcaccgcctttgaccgtggcaccgtgaagcgccaggaggaaaccattgaacgcctgtatggtcagctcaatgagtggcacgactgggctacagacgtcatttgtagcccgtcatcactgggcagtgaagcgcagcggactgccatcacctcagcgatgcgcaagcgcaaggagcgcattgagtcactggagcagatcgtgaaggatgtcgttgcacagcgtgacgcgtgggttatttgggcgcgcgggtacaccaacgcaccggcaggcattcacagcaccgaacaacttctttcgatggtgaaggcgaaagtgaaggcgatcacagagggcgtcgacgggccagcggagcacaccatgtgcggcacactgaaagtcacccagctgaaaggggatgtcgttgccagcaatggaagctgggccatgctcaaacacggcaacgcggtgatcgccggaagcattcccgccagcaagctgaccctgggcgaggagatgaaagaggccattcgcgaagtcgtccgggaggagatgagcagcgcgttaaagcaagccatcaagaacgaacttgataagctgaccatgtaacccatcaaatcattaaccagcggcccacgacgggccgcaatgaggtgaatcaatgcagaccttctacctagtctttagcgccattctgtgcctgttttgctttctctgctgcaaagggtgggcgacggccctggacatcggagccgggaaagacaagcgcatgatcaggatggctcgcaccttcgacatcgctggcgacgtgttccgctgggcgtgctggctgttcattgtcgcgggcttccttcgcaccctcggattgttctgattgcttacactttgtaccatttgcccggttgatcaccgaagtgactgactgataggctttgatgaggctcgcagcgaggtggaaatgatggggatcgtaatgggtgtgtggttggcgctggtgacagctatcgcgatgatcgcaattcacatggccgcaatggacagggagcggctcaaggccaacccggtcagccagatcaccaagctggtgctcgcggtattcctcctggtcggcgtagcgcacatcgccaccaggtacacagctttcctccgcgtgctatcctgacctgacaactgctatcatggccccgttaacacaacggggcttttttatgtctatccaatctgacgccagtcaattcattgacctgacactcacaccaccgcagaacgactttctgcaactgtcgtgcaaacacccggccttcgtggcgggcttcggtacaggcaagagtcagaccatggccgtgtcgtccgtgcttgacgcctcagagggtggcgcagatgccacgatcgccatccttgagccaacgttcgacctgtgcaagctgatcgcagtgccgcgtatcgaacagatcctctcagagctgggcattcgctttaagaccgtcggcaacaaggagatctacacctcccacggcgggatcggcgacttcctctttcgctccatggacaacccggctcgcctggtcggctgggaggcgttccgcatccactgcgatgagatcgacaccctcaagaaagaggccgccaaaggggtctggcgcgcagccattgcccgctgccgtcagtcaccgaaggagtatgagccgttcgacttccttccgtcagaccgcccgctgaacagggttagcgcctactgcacgcccgaggggttcaacttcctgtatggccgctgggcgaaggacaaggagcgcagccgaaaggccggttatctcatgatccaggccgccacctcatccaaccccttcctgcctgccgactacctggacgccctgcgcgccagctacgacccgcagcgcttcgaggcctacgcaaaggggcaattcgtcaacctgaaatcggggacggtctataagaactttaagcgcgagctgaatgacaccgatgtggagatcatacctggcgagacgctgatcgtcggccaggacttcaacgttaacaagatggcgaccgtcgtctacgtcgagcgctatggcgaggacgggcttgccgaactgcatgcagtggacgagcgacacaacggcatcgacacaccggacgtcatccgctggctggtcgagaagtaccagaactcgggaaatggctacatccacccgatcgaggtctacccggatgcgtccggcggcaacaccagcagcaagaacgccagcatgtcagacctgtcgatgctcatgagcgcagggttcgacgtctactgtggtcaggccaaccctgccgtgaaggacagggtgatcagcgcgaacaccctgttctgcaacgccagcggccgccgtcggctattcgtgagcagcaagcgttgcccgcaattcgtcgaatgtctggagcagcagatctacgatgacaagggcaagcctgacaaggaggccgggaaggatcacatgaacgacgcaggcacctacccggtggtctataagttccctgtcgtgcataatggcacgatctcagcaaataatattgaatgggtacgatgatatgacgatcacgacactgccgcaggcggggacggtatccaccgaacacccgctttacaagcggttaccaggaataccgcactatcgaggactgcattgcaggacagacggtcatcaagcgtgccggtgttctgtacctgccgaagcccgaagcgtggacaatgaagcgttacaacgcgtacaagcgccgcgcccacttcctcaacgccacctatcgcacgcagatgggtatggtcggcatcgcgttcgccaaaccggccacctacaccttgccgacggccatcggctacctgtcgaccgacatcgacggcgaagggctggacatggatcagctcgttcgaatgtgcgtagcgcagaacatcaccttcgggcgcggtgggctgctggttgactatgacgccccggaggacgtcgggcaggtgacgacgctggtcaacagtggccgcgcgactatccgcatgttcgaccaccggcagatcatcaactggcgcaagagcggcggcaaatattcgctcatcgtgctgcgctacctggacgacgtcgactacgacggctttgagcactatcaggtggttcgctaccttgaactgcggctggtggatggcaaggcatattcccgcctgtggacggacgaactacagggtgccgccgggctgccttcctcggtcattcagcagaacgggaacatgaatcaggagcagccggaactgcgcccgatcatggctcgcggaaagcagctcgactatctgccgttctgctggttcggtagcgagaagaacgacagcgacattgacccggctcctctgtcagacatcgcgaacaccaacatcgcccactacaacgccgacgccgacaacaccgacagctcgtttatctgcggccagccgaccttcgtgatcgccggtgtgcctcagaacttcgtaaaggacaatccgagtatcaaggttggcggtgacgaggcgatcattctgcaatccatgggcaccggcacgcctaccgccagcatggtcgttgcaccaccgaacaccccggccgccgcgctgctggagaagcgtgagaagcagcttgccatgctgggcgcgaagctggttgagcgcaacggggcaacgaagaccgccacccaggctggcgcggatgagaaaaccgacaactcgatcctgtcccagtgcgtcggcaacgttgaggcggcgttcaatcaggcaatggagatggtgaaggacttcaccggcaccgaaggagcgaacgtccacatcaacaagcgatacgaagatatcgtgctgaacccgacagaactgacagcctacatggcggcggtgcagtcagggatgatgcgtatgatcgacttcctcgcgtggcagcagcgcatcggcctgatcccgaacgacgcagatctggaagacgttgaacaggagctgaaagacggtgccgaagaaacgcagctgatcttcaacgcggccgctcgccagacccagcaggggctggacaatccgtcggaagataaagacccggaggaagacaagccgatctctaagaagaaggccagcgcgccgaagaagggggctaaatgacatccgttaactcgcggatggcgtcggaggcggtaaggcaccgcctctacctctaccgctacagcgaaggccaggcgaagaagatgacccagctactgcgccgaatgtccgtggacgtggtcggccgcctgctgtacgcgctggacgactcaaagatctccgccgacaactacacggtgaagcgtcttgaggccatcaaagcagccattaacccgacgatcaaccgcatctacaaaaccacctacggccagctcaaagccgaccttgaggcgctgagtaacggcgagctggcgtaccagtaccgcacgtggcgaacgctcatccctaacccggtgctggacttcgtgggtgggctggtggagatcccggaaacgcaggtatgggcagcggcgaacagtcgcccgttccagggcatgcttcttcgtgacatcccgtcagtgctgggcgaggccatgaccgactcgatcggtcgggcggtgcagcagggcattctacagggcgagacgtatgaccagatcattcgacgggtcaaaggcagcgcagcagcggcctacaaagacggggtgatcggcaccaacgagcgccaccttgccaccgtcacccgcagcgcagtgtcgcacgtcgcagctgaggcgcgggacaagatcggcgaggccaacgccccgctcatcaagtcagaacagtggctttctacgctggacaataagacgtcgaagctgtgcatcatccgcgatcagctgctgtacatgcgggacaagaagcacacgccgatcggccatagcgtgccctacggcgctggccccgggcgtctgcacatgaactgccgcagtacttcgaccttcgtgttcaagagctgggaggaattgggcgttccgggagtcaagatcaagggagcgtcgcgcgccagcatgaacggacaggtgccgatttacatggactattcgagctgggtggagcgccagcctatgagcacgttaacgcaggtgttcggcgtggagcgtgcgcagctcatccgcgacggcaagatctcaccgcctgacctgttcaacgacaagggggagtatttaacactcgcccaacttcgcgaccttgaccgcatcccggcagaagactaacatcgtgccgttgacaacacaggagctatcacatgtggaaatatctgattaacaaagaagcgtttgacgccctcacccctgagcagcaggctgcatacaaggcagtcggtgattctggcaactatgtgatgaacatcgaaggcatgcctgacgtgcaggccatgcagcagcagatggccgatcttcaaacccgcctgggcaccatcgacgcagagaaggccgccgaagcagagaaggcccgacaggcagcgcttgacctggcgaagaagaacggcgactttaagaccatcgaagaggactataagcgtcagatcgccgacctgaacagcaagatcgagggcttcggcaagcagcgccgcgacgacttcctgaacgcgcagatcgataagctggccgcagagctgggtggcaaggagtatgccgcgctgttcaaaccggcgttgcagcagcgcctgtctgtcgagggtggtgaagatggctccgacttcatccctcgcgtgctgaaagacggcaagccgtcggcgatgtcactgaacgacctgatcggcgagttccgagcagacccgacttacaagccggtgtgcgtagcgcctgcatcctctggcacaggccgccatcaggcaccgaccccgacgcctccggcttccgataagctcccgagccttgacgatgtgcgaggtaagcaactgagccgcgcagaacagatcgcggcaagtatcagcgacgcagagtaagtaagtacaggcccggcaatgccgggctttttcttgcttgtccagtagttgccggttatcatccagacgtttaataactcaaaggacatcgcgcgatgagctttactatcttccaacgaaaactgatcggtactaccgttcagcttctgactgaaaacctgaacgtgttcaacgcggcttccggtggcaccatgcttatcggcagcggcgaggttatcaaggaaaccatggagaaaatgaccattgggatcattgacggcctggtgcaggatcgcaacgaacacgcccccgttaacactgtggttcagccgaaggtgctttcccgcatcctgggcggctccatcaactccgctggccgccttgggccggtagccatcacctccggccagctgcgactgatcgagactgacgtgaaccgcgcggcagccgagatcgcaaccctcgcgtcggaagccatgctgaaacgctacgtgaccgtggcaatgggtgctggcgtggctgcgatcgaagcgttcggtcagggtatctatacccaggacgcccacgtgaccagcaaagccggtgaactgtatccgaccgtcgaagacttcccgctggcggcgtccatcttcggcgaccaggccgacctgattcgcacctggttcatgtccggcacccagtgggcgaagttctccgcccgtgaagcggtcaagtccgccaaactggtgtttgagctgggcaacatgaagatcttcaccgatggcttcggtcgttcgttcgtggtatccgacgcggcaagcgctggcatctctgcggcgacctctggcggctcagcgatctacgcacctgatcaggcgatcgtcggtctggcgtccaacgccatccaggtaacgaccaccggcctcaaaatggctgctgacccggccaagctgggcggcgagaatattgaaagctggtggcagggtgagtttaattacagcattgccctcaaaggcatgcgtcctaccctggagttccgcacagccaccgaaggcaagaagactccgaccatggccgacctggtcaagaaagagaactgggaagccgagaagggcgaaaccgaccgcaagccggttggcaacgacgccgatccggtggtgccgactcgcaacgtgcgcgagacgctggggatcattatgaagctgaccccaactaccatcccggtagcaggcgctggtgtgtaagcgaagaagtgaataatatgggggccgattggcccccttttcattggagcaaaatatgatcggcaatctggacgacctgaaagcattcgcggcggccaacggctacacgggaatgactgacgaagagctgagcaccgcgctccgccaggctaacctgtggctgtggtcactgtcatggaagggcgagcaggctgaacccggacagacggacatttggccgcgcactatctgcgacgactacaactgtctcgactatgacacaccgccggaagtcctccgctttacttacaccatcgtgtgcgacgccgtagactctggaacggagttcaacaccgcatcggctggcgcgtataagaaacgcacccggatcgagggcgcgatagatgtcgagtacagcgagcagagcctatacagcgcaggcttcgaggcaccctacatgatgggcatgatcgggcactggctggaaggcaacgggcgcggctgtaacgtcaaaatggagcgcggataatgaacaagctctatcgcgaactgcgggcagaggcccgcaagctgttcaaggagtacggcgcagtcatcaccatcagcaccccgggcggcatcagccgcgacaccgtcaccggcgaggaagtggtgacgccaccgggcgcggtatgcaaggtgctgggcgtcatcaccggcgtcgacctcaagttttgggggctggcgaccatcccgccgggcgagcagcagatcgtcatggcatggacggacaccaccgggaaggagtgggagccgaagatgaatatgaccgtctcaggtggtggccgcacgtactccatcaccgagattaagccggttatcccagacggtggctacggcatcgtgtacaagctgaggatcaaggggctgtaatggcaagcaagcggaacgggacaatctttgccaacaatgtcgctcagtgggctggtggggtcgtcgagcgtcacgaagagatcgtgcagctggcggcgatgaaggtcttcgcgatgatcatccagcgctcgcccgtcggcaaccctgacctgtggaaccgcaaccagcaggccgtcaaggagcgcaaccgcatgagcgacctacgaacggccatgcgcgaaagcgacaccttcggctacacgaccaagcgcggcacccgccgcctcaagcctggcgcgaacatcgttgcagcaccggcgaaattctcttcccctgtcgggccagtcggcccgcgcatcccccgacttctcaagaatgagcagggcgtcaacccggtcgggaagggctacgtcggtggccggttccgggctaactggcaggtggggatcgactttgtccctattgagtggctggatgaacgggacaagtcaggcaccccgaccatcaacaaaatggtgaacgccgtcgagcgcttccgcgtcgggatggctgagcatatttatttcgttaacaattcgccgtatggctacccgctggaatatgaggggcactcacgacaggctcccgccgggatggtcaggatctcatgtatccaatttgaggaagcattcgcggcagcaacagcagaggcacaaaaattatgatcagcacttcacagattcaggcgaaattcgacctaatcgcaatgcagtgggggaacaacaacaatatcgccctcgtgtggcgtaacagcgccgataacgacatgaacgatcaggcggtgagtcagctggtcggcttcccgcagcacatcccggccccgtctatctccatgggcttccagcagtcagatatcgcgaagcgcgggatctatcaggtgatgctgcgtgctccgcgcctgtccggcacccggcagatctacgatgcagccgatgcgctggtggaggcgttcaatgaagcgatgttctatgacggtaattatgttagcatcggcgacgatgaccagcagctataccttacggcaccggctgaaatcggcgctgactatgaagacgacgccgggctgcatgtggctgtcacgatgaactaccgtatcaataacgcaagaggctaacatggctacgaaactctcatacaacatcccgaacggctcaacgctgcaaatcgctcagacgatgggtgcaagccttgccgtgtcgggtatctccaacgcgaaagaggcagtagccaccctgtcggctgctgattccagtatcgccgctggcgactacgttcagctgtttaccagctgggtcaatatgaatggcctggtctgccgcgtgaagtccatcaccaccgacaaggtgacactggagaaggtcgacacctcagacaccgaaatctacccggaaggcggcggcgctggcactctggtcaagattcaggcatggatcgacctgccgttgaccccgactatctccaactccgggaacgagcagcagaccaccacgttccaggctatccagcacgagcgcgcggtgaacatcaacacctataagtcggcagcgacgcagaccttcaccatggcgcacgacgccagcgcgccagtgcgtgaagtgttgaagcagctggatcgctcgcaggatgtgacggcgttcaagttctacaacaagcgcgctaaggagactcgcgtttatggctgccaggtctcctttaacgagatcccggcatccgaagtgaacaacgtcgaaacgaacagccttgttctgagcctggtcagtgagatggtgatctatcctgccgcgtaaagcgtgctatcatcagggcggcttaggccgcctttttcatatctggagacaatagacaatggctgcaaaattcaagttagtacccgctggcacgttcgaacttccgatcctgatcaccaccgtagggcaggatgagcctaccgagctgaaatttacgttcaagcgcatgccgctgaccgagctgaaagagaagcaggaagcgatggcgaagcgcgtgcaggagatggatgaggaatataagggcaaaaagctgtccgttgtcgaagatagcgtgctgcaatatcctttgatggccgattttgtgctggacatcgcaaccggctgggagctgtctgacgagttcacgaaagagaacctgatcaccctgttcgataactacccgacggcgtttatgtcgatcagcgttggctatcagtccgagctgtggaagctgcgccaaaagcactaaccgccgcgattgagggtctgtatttccccgatccgccgcagcagctggtcgataatttcgggggggagctggaagactaccgtccagaagtggagctatcagcagagattgttgatagcttttatttttaccagcgtattgatacccaatggcgcacggggccgggcggtttaatcggcctcgactacaacgtgatccccgtcatggctgacctgtatggcgtcaagttcgatcgcctgctcatggatgacctggcaatcatggagggggccgcgatcagagttctcatgagcaggagtgatacagcatgagtgaaaacacagaacgcttgatcgtcgacgtcgacgccagcggggtcaacgcgggggccaaatccctcgcagaccttgttgacgcggcgcaggacgcaggcagggcagcggacgggctgggcgacaagttcgaccaggtgaagccgtcagccgactcagcagccgcagcggtcgacaacttcaacaacgaggcgaagcagacgcaggaggctgctggcgacgctgccgtggggctgtaccggcagaatcaggagcttcaaaacctgctcgaccgcatcaggccaacgcgcgttcagcttcgtgacctggcgcagcagcaggaggcactggcgaaggcgcaggctaacgggctgctgggcgcgaaggaagcggaggagtacaacgctatcctcgccaaccgtgccgggatcatcgaccgcaacgacgctgctatgcgcggcctgaatgtgacgtctgagaagcagaagacgctacagcagggattaaccatcactaccgggcaataccgcgctgctatgggtatgttaccggcgcagatgaccgatatcgtcacccagctggcaggtggtcagaatccattcctgatcatgatccagcagggcgggcagattaaagactcgttcggcgggctgggcaacaccttccaggcgcttaaacaattcatttccccttccttcctcgggctggctggcgcgacagcagccatcgctgcaatgggttatgcagcctacaccagcgcagaccaggccgatcgactcgctgcatcggtgacgctcatgggtggggcaggctttaagtcagccgaagagctgaacagggccgccgtcatgatccagaagtcaactggcgacagcattagcagcatcaccgaccggctgatcgagctgaacaacaagggcacgatgacagccgacatgatggagaaggtggcgatctcaacgtcgaagctgtcagatgccgggctggacgctggcgacgtcatgaaagacttcgataatctggtgaagaacccgatcaagtctatcgccgcgctcaatgagcagtatggcttcatgaccgaagcgcagatgaagcacctaatccagacgcagaaggagaagggtgagcaggctgctgctgccgaagcgctggacatctacacaacggccatgaataagcgggccgatgacgtgatcgagaagactgataacgtcggtcaggcatggaagacgctgaaaaccgccgcgtcggatgtctttaacgatatggggatcgtgctgcgctcgtgggggaaccgcgccgtcgacattttcaagatggtcaagctatcgatcgacgacctgctgaactatcttgcgcagatggacagcaaatttacgctgggcgttgctgacctgctggacaaggttccgggcgttgatggccgtggcgttctccgggcgatgggtatcgacgtcgaaaccgtcgagaaaaatggccgggagtccatcgagaagggcaagcagatcgcgaaggagttcgcggaggtcagtaagcgggcatttgaaagccaggcagacgctgaggcgcgggcgcgcaacgccaacggcgctaccggcagcggtgctaccgatgagaagagcagggaagcggtcagcaagctggcgaatgagtcaacgaagcacaacaaggagaaggccgtcaccgttgcgcagggtgatcgcatccttgagcagtatcaggcgcaggagctggcattacgggcgcagatcaagacgctgaaagaccgtaacgccttcgacgtcaacgcctccgagcagatgaagaactatcagctgttagtcgcgaagatctccatccttgagggcatccgggctgacgccaaaggccgggcactcaccaaggacgaacagtcacttctggcgagcaaagaggagattctcgcgaaggccaagaccgtcggactgctgggcgatcaggtcaagcagcttgaacgtcaggcgcagatcaccgatgagctgacccgcagcggcaatgacctgtctgttcaggtggcggccattaacgcctcatggggtctatcagccgatgaggctgcgcggctgctggagaacatgcagcgagcggcggccctccgggacaaaggcgcgactcaggagcaaatcgacgaggacgcacgccagcgtgaagcgctgcggcaggctaccgacgcgaaaacgcaggactgggcaggcggcgcacgctccgcgatcgaagcgtggggtaaggatgccaccaacacctcagccaacgtacagaaggccatcactggcgcaatggatgccggtctggactcgatcaactccttcgtgatgaccggtaaggcgtcgttcgccgactttacaaaatccatccttgggatgatggttcagatgatcaacaaatggctcatgttcaaagccatccaggggatcggcggcgcgatgggcttcgatatgtccagcatcggattcaatgcgaagggtggcgtatacgacagcccgtctctgtctgcgtacagcaaccgcgtctacaccacgccgcagctgttcacgtatgacaagccgaagccgtttgcgaagggcggggtgttcgccgaagccgggccggaagccatcatgccactggcgaaggattccagcgggcgtcttggtgttcgtgctcatggcggcgctggtggcggcgtctccatcgggtcgatggaagtgaatatcgaccagaacgggcaggcgacggccaacgtgtcagagtctggcaagctgggacgagcctacggtgatgcaatggccgcagccattcaggacggcatcgcccgtgcaagctcaccgggtggacagatctggatgcttattaacggtcacgcgtgataacctacagcctcccacacaggaggcttttttttatggctacattagacgcgtggatctggccgctggcggcaggtcaacaggtatcagtgaaagaccgcagccgatcgaacagcttcggcgacggctcacagcagaacgttttagaaggcatcaatccgttcattatggaggtgccctgctcgtggactggcaacgccaagaccggaaaccagatcctatccttcctgaaagcgcacatcaccaacccgttccagatggttccgccgcatggcgaactgggcatttacaccgtgaaatcaggaacgatcaaatatgtcgcgctgggacgtgcaaccatgaacattaccttcacagccgagcaggccgtgggcatctacacaggggtgaaaggatgagcaacaccattttcgacgaagccacaaagctcgacccgtctggcaagatcattctcatggagatcgacggaaccgagttcggcgcggggatcatccggggccactattgccagctcccgcacacgagcaaggagatcctcgacagtgctaacagcacgctgacccgtgatcagctgttcaagtgcgtcggcaatggagtacgcgggtcggtgacgaagaacgaagaccgtaacaccatcaacttcaaatcgtcagcagctgacgcgaaccttctgctgccctcgttcaccggcggcctgactggtagcaaatatcaggtggttgaagtcgttggccgctgggttactcccccgcccgcctcggataactattatcagatttactataagacggcgggccatgatttttctcccggctactataagggcgggtcgttggcgagcgtaaccgaagatcttggtgatggctggctgaaattctcgttcgacatgtcgaagctgagcgctggcggttcagactgggtaaacagccagattatcggcattcgcattgacctgtggcagcaggctgtcggcgagatcgagatcaagagaatcagcatcctgaacaagaacccgcacgaggttgacgcgtccaagctggcaccgaagtcaatctggttcgacaacgtcgaatatggctattggccgtttatggctgagggtatcgagttcagcagcgagcagcaggggacgcctaccctgtccattggcaaccagtcgggggtcgtcagcgcctacctgcgcgcttatcagcagatggtaggggcaaaggtcaagatcatccagacctacgcgaagtttctcgatccgcgcaacttcacagatggcaacgagttcgccgactcaatgcagcagtggacgcagctttactacatcgatcggccagactatgaaagcgaagagtatgtgcggttcgcgctttcgtctccgctcgacctacagaactttcaggtgccaacgcggcagatcacgacgttctgtcaatggcaggctcgcgggctttacggtaaaggccttgacgccggggaggaaaacgggtgcagctggaaccgtggcacggctaaaaagtggtacgacaagcacgggaaccaggtggacgacatcacgaaggatgagtgcggcgggtgcattcaggattgccgcctacgcttcggccagctggtgagtgacccaaaagcggccgttcttgactacggcggttttatctctgtgcgcctgattgattaaacgcactgtatcgcgttctgcggcgttttcttgcgtaagacgtccgaacgtatggcctgacggcgttaaacgcgatagcgtgccgttcaggcccgtagttttcgattcacgaagataagaatacatcccatagccatatataataaaaaccctcccaagggagttttatttatatggtcttgggtatgtcttatatgtatttatggtaataaatatatatacccataccacctaacacctgaaattcagcattataaatcaatgatttaaaatttcaggtggtgccaagtggaggcaaaaatgattgacgtaaatgacatcccggaacagcaattaacatatattaaacaacatcttacagagtgttcgccgcaagagggctgcgggctgctggtgaattcaggcggaggcctcgaatactggcccgtcatcaactcagcagcagacaaaatgaacagcttccgcattgctccgcaggacttcgctgaggctgaggacgtaggcaatatcgttgccgtcatccattcacaccctggcgctgacggtctggcgtatccgtccattctcgatcgccagctcatgcaggaaacttgcttaccgtggttcatctacgccccggacaaggatgagatggcggtgttctttgaggagccgaaggggctgctgggtcgtgacttcgtgctgggtgcgaccgactgctacggcctggtgatggcgtggcaccgttcgcgaggcatccagcttcctgacttccgcaagccgtacccgtggtgggagaagggtgaggagcttttcacggatgagaatttttcagcagctggatttatcaagaaggccgaggcagagccgggcgacatggtggtgttccgtatcgcgtccagcgtaagcaatcactgcgggatctacaccggcgacgggatgattatgcaccacctcatgaaccgcaaatcgaccattgataggatgtatggaacctacctggaaccgcgcattactggtattctccgacatgagttactaccggagaacacaccatgggaaaccagctaagcaccatccgactgtacggcgaaatgggggcgcgcttcgggcgcgtccatcacctcgcggtcgactcctgcgccgaagcgatcagcgccctttccgccatcctccccggattcgatcaatatatgcgtgacagccagtcgcgcggcctgaccttcgccccgttcatcggaaagcggaacatcggcttcaatgagatgtcgcagccaatccctgctggcgaagagttccgcattgccccgatcatcatcggcaacaagaagggcggcctgttccagaccatcctgggcgctgcaatgattgttgcgggcgtcgtggcatcgttcatccccggcgggcaggccgtctccccttacctcgttgctgcgggtatctccacggctgctggcggggttatgcagatgctgtccccccaggcgacaggtatgaagatccgggaggatgacgccaacgcgccgtcatacgccttcggccagccggtcaacacgacagcacaaggtaacatcgttggtgttttgtatggcgagcgtgagatcgggggtgctatcatcagcgccggaattatcgctaacgaggtacgttcttaatggaaatcaaaggatacaagggcgggagtagcaacgtgcatacccccgttgaagatccagactccctgatcagcaacgcaacggtaaggatgctcctggcgttgtcagagggtgaaaccgtgccgattagcgcggaagacctgccgaagcgtgtctatctggacggtacgccagttcagaacgatgacgggtcagttaacattccgggcgtaacactggaatatcgcaacggcaccccgcagcaggagccgatcaacggcttcccggcggtggaaagtgaaacacgtatcaacgtggagctgaaaaagtcggctgcatgggtgcgtaacatcaccaacaccgagatcgacgcagtccgcatccgaatgaatttccggctggtcatccagcagaaggacggggatcgcgtaggcggacgcattgagtaccggattgaataccgcaaagtcggcgacagcgcctacaccgtggccttcaatggtgctgtcgacggcaagcagaaagacaactatgaacgcgatcaccgcatcgacctgccgaagagcagcaccggctggcaaatccgcgtgacccgcctaactgacgacagcacgtctgataccaccgtgctcaactccgggatcgtggctgtcaccgagatcgtcgacgcccgcgttcgttacccgtggacgtccctactgttcgtcagcttcgacgccaaatcgttccagaacatcccgaaaatcagcatcaagatgggcggccgtctggtgctggttccgtccaactatgacccggttaaccacacctacagcgggtcgtggaacgggacatttaaacaggcgtggacggataacccggcgtggatcgtctacgacatcattctgcacaagcgctttggtattggccgccgtatcccgtcctcattcctgaacaaatggacgatgtacagcatcgcacagcgctgcgatgagctggtgacgaacgccgacggcacgcagaatcgccgttacacctgtaacgtgtatatccagaaacgcgcgcatgcgtggagcgtcatccgtgacctggcgtcgatctttaacggaatggtcagctacagcaatatgcaattgcagttcgcgcaggatgcaccggcagaagtccgccatgttgtgacaaacgatgacgtcgtgaacgggacgttcgagtattcctacggcagcatggctaaccgccgcgggatcgcgatggtcacttttgacgacccgaaggcgcactataagacgcagaccactgtggcgcagatcaaagacctcgtggagcgttatggcgttgagccgctggaagtgtccggcatcggctgcacggacgaatacgaagcgcaacgtcgtggcctgtgggcgctgctgtcgaacaccaacgacatgcagatcagctaccgcgtcggcctgaacggcatcaagtacctgatcggcgacgtcgtcggcatcgctaaccgctacgtgcagggcggtcagttcggcgggcgtgttgctggcgtatccggcaccaccatcaccaccgaccgcatgatctccgaccacgtggcaatcggcgacagagtgatcgttcgtcaagctggatcggatggaacctacaaccgcgtgatcaatgcaatcgcggctgaccggatgtccttcaccgtcgacggcactaaccttgatattcagagcggtgaagtgttcctgctggatactaaggtgctggcaccggaactaatccgcatcaccaagatcacctacaacgagcaggacaataatttcaccgttaccggtctgcaatacagccactcgaagtatttgcaggttgacaccggcgcgcgaattgaagaccgcccgacatcgctgatcccgaccggtcaggtacaggcacccgctaacgtggtggccgaaggctacagtatcgttaaccaggggattcgctcagctaacgtaaactgttcatggttcaccgtagatcaggccgtcagctacgacattcaggtgcgccgaacctctcagtcaaacggccagtggtcacaggggtggactaaccttgccagccagtcaagcacgtccgttgacctgacaaacgttcttaccggcacctatcagttccgcgttcgttccgtatcccgtgacggcggttcgtctcagtgggtcgagtcgaatcaggtgttcgttgacggcaagcgcggcagcatcccggcagtagctggcctgaacggcgtaggcatcgttaacggcattacctggcgttgggtgactggcacggatgatctgatcgatatgaagtcgacagagctacagttccagcgcattgacggcaatggtgctccggttggtgggtggatcgatctcagcgtcgtgacctacccgactgggacgttcacacagtccggtctgaaatttgccgaacgcgtgcaggtgcgtgcccgctttgtgtcgtcatatagcgacgctggcgagtggagcgccccggtcatggcgatgacgtccgacaacatggacgactattaccagaacatcgacgacgcgatcaaaggctccgacacctacggcgaacttaccagcggcatcaaagacgtaagcgacagcgcacaggcagcgaaagacgccgcgcaggccgcgcaggttactgctgacggagcagtggcaaccaaccagcagcagcagcagcagctgaacaaccagctggccgagatccagaagaacgcgcaggacatcaccaacaccgctaacgccggggcggaaaacgccagcgcaatcgctcaggagatccttgaccgcaaggctggcgacatcgcgaacgccaacaaggcagcacaggacgtggccgacgctatcgcgaaggctgagacggatgacgcacaggtggcagctgacgcagcggctaacctgctgaccgcgaagaacgaagtagaagcgcagatcagcaccaccaataccacgatgcaggacggcttcgacagtctggcgcagcagatggcatccatttccgctggcaccggcgagcagttcgacagcctagctatctggtacttcgacaatggcccggaagggtgggcttctgacgacgccaacaccaatctgctcccagtagaccaagatggctggatttacccagctggcgcagcagccaccatgcgctcaccgaacccgctggcaatcgacgcgcgcagctataagtacatgcgcctgcgcatgaagcgagtcgggaacccgtcatgggctggcaagctgtattggatcggtgttgatgagactggctggacaagtacccgctcgcttgctatcccggcacctgactttgacccgaccaccgggatcactgtcctgtcgctccctgatctcctgtgggcgacatccggcaccgttcgccgcctgcgtctggacttctcaaccaaccaggacgccaataactactacgcgatcgactggatggcagtcggccgaccgaccccgggcgcgtctcaggcgcagattcaggatcttcgcaccgccatgaccgctgcggactctgccgaagccgcagcgcgtaacacgctggccgtacagcttcgcgggaactatgagggaaccgacccttcaaagctggtgactggcatcatcttcaacgagcgccagacccgtgtcaccgcagagcaggcgatcgccagcgacgtcaacaccctgcgcactgactacaacgcgaacaaggccgccgtgacccagcgtctcgacacgctgaccagcgagaaccagtctcaggcgcaggcgcttacccagcttcaaagcggcctgaccgacgcgaacggaaagatcggcgctaacgctacagccatcagccagctcaagacggacgtgacagcgctggacggtcgagtgtcggcaaacagcgggctgatcactaacctgcgcagtgacctgaataacatgcgcgtcggcggcaccaacctgatccctaactctggcacgctggcaggcgtcagcggcgttgtgcagggtcagacgtacaaaggcaatgctatccgtcgcatcgcgattgcagcagcctcagctggctcctacgaccaatttgagtatgagcttgcggctccgatcgacggaaccgaagtagtcgtcagcttctacgcgaaagcgaacaacgccgacagcaagcaaattttcgtctacctgtacaacccgaatgccacgcttacagctttaagcagtcagggtaaaactggcagctgggctactggcggcgatggttcgatgacaatcgaccttacggaagactgggcgcgctactgggtgaaatacacccgcaagagcggccagacaggcacccagcgcgttatttttggccgactgctgaaagggtctaaggacaaagaggtttacatcagctcgccaaaattcgagtacggcaccatgcctaccgagtggagcgaagcaccagctgacaatgccagcgcaagcgcgttgcaggcactgaccacccgtgtcactgcggcggaaggcaccatcagcaccaacagccaggcgatcaccaagctcaaaggcgacgtgagcaccttacagggtcaggtggcgaccaaggccgaagcgagcgcattgcagcagctggcgactactgtcacccagcaggggaacaccatctcttcgcagggtcaggccatcaccgacttgcagaacactgcacagaacgggaaagcgaattactggctgaccaagatcttcgacatcaaggttaacggtagcgggtacatccctaagctgtccgacctgtctggcgttcctccgctggccgtgtccgagatggctgacgctgcaaagctggacttcctgacttacggcgactacaaaatcgcgtatgcgaaggcgctggtgtatgtcgcggctgataagaccatcgctatctctcccggatcccgcatcatggacgacaccgggcgactgtatgtcaacggggtggaaacggcatcatttggtgccagcactggcaactacagcctgtcgctaaaaaaaggctggaacacgctggagttcgtggttgcgcagatcaccggtcagttctatatcaactttggactcaagctgtccgataacgtcgatcagatgttcagtggtgccggtcagctggccgctgcatccgcctcgcaggtgctctcatctcaggttgagcagacctccgggaaggttgacgcgaacagtgccgcgatcgtcactctgaacaactcggtgcgggacatcaacaccgcgctgaacaacaaggctgacgcgagcgcattgcagtcgctgaccacccgtgtcaccaccgcagaagggaagatcactgcacagggcaatgcaattacccagctcaccagcgacctgtcgacggccaacgggaagatctccgctaactcaacggcgatcaataacctgacgacgcgcgtcaccgcagcggaagggaagattgattcccaagctgagtccatcacctcgatcaactcatcgatcaaaggcgtgctgactcaggcggcaaacctcatcccgaacccgacggtagacccagcttatcagcaaatgggtatgaccgttgtttccaccgcgtcagaaggcgttcctgctggatgcccttacccgtgggcgattaagtgccagtatcgtgatcacgttccggcaatgaataacatcccttgccgcgaaggtcaggtgtttgagctgtctgtactggctgcatgtggcactggcactgcaccgttccagcactacatcgggacgtcgactctggtttctggcagcattgggtcgccacaagcgaacggaggccaaatctcagcggctaccggcgcgaagtggacgcgcactacgtggcgctggacagtaaacgcggcgcagggtgcgaagggttacttccgcccgttcctgcaaatcaaccaatcaggcccggacttcgggacagtatggtatgcgaccgactggcaggtgcgcgacgtcaccgcagcggcgaatgccgaaggcaaggccgacgccaacgccacggcgatcagccagctgacaacccgcgttacttctgcggaagggtcgatcacgtctcagggtcaggccattaccaagctgaccagcgatctgagcacgcttaccggcattgtgaacaccaaggccgatgcttcggcgctgaacgctcttaccacccgcgtgtcgactgccgaaggtaagatcgattcacagggtcagtcgatcacccagctgagcaatagcctgtccgcaactgacgcctcaatcgacgcgcagggcaagatccccgggaacctgctggctaactcatcgtttgagcgcggcccggttaacttcaccggctggagcagccttgccaccatcatcacggcaacgcagccgcactctggcaccaagatcgtcaggatgggggcaggcggaagtgctggcatcggccaggcggtggaagtcacgcagggccgccggtatcgctttggtgtgtttgccaaacaggaatctggcactgttatcaatgacccgggcaatactaagttccgcattgctgacgactctggcctgctggtgggcacgaactatggcccgtttactggaacatggcagcacgtcttcatggactggacggccacgaagaccaccaccgcacaattccagctgactacatggctgagcgctggcgcgatgtacttcgacgacgtctatgtggtcgacatcaccaacgacaccaagatccaggcgaatgctgacgcgatcacctctctgaacacgaaagtgacccagcagggcaacgacatcacgtcgcagggaagcgcgatcacccagctgaacaactcgcttaaaactgtgcagtacagcaacagcaacccgtgggtagatggctcgttcgagtcgtatgacaaccagcaagccatcggcggatctaatggcttggtcactactgacttctcattcagtggtcagaagtcgcttatgtgtcgccgcgccaacggtgaatacggaaactccgacaagactttcgggtatgaaacagccgtgcgcgaaagcgctgtttatcgcttcgaatgctgggcgatgatgccggaagacgagacgccgccggaagggtggaactgtgttttgggcttgatggttcgcacctcagccaaccagaacgcatggcctagcgcattcgtcatcacagaggcagggcttgctgctggtggtggtcgtggtaagtgggtcaagttctccggcaaggtcggcgtgggcggcggacagaagacacgaggccgtctgtggatctccactcgcggcacttccggcggcccgggatatcgcatctatatcgacgatctggtgatcaccgacgttaccgacgctcacgcagcacagaccaccgcagacgctaactcaagcgcgatcagcagcctgaccagccgtgtgagcaccgcagaagggcagatcacatctcaggcagacgcgatcaccaagctgaacggtgacgttagcaccatcaacggaacgctgagccagaaggctgacgccagcgcagtcaccgcactgcaaacgcgcgtgaccaccgcagaaggccaaatcgcgagcaatggcacggccatcaccaacctgaataacggcctggaagcacagcgacgcaccggtgaaaacctcgtgcagaactatgacttcatgcagggcgataccgcattcagcgtgcagcgggatagtttcagcacagtaacgttcggcgactacggagatggcaagccaggcgtgcgcatggtgaaagtcaacgccacatcgccaggcctgttcgcgaacaacaaaaagccggtgccgcagaacggccagcgccgctatcgctatgttgtgcgcgcgaagtccgtaagcggtgggaataaccttcttatgcgtcgctggaatttcaacggctccgtagaaggctcttataccgacaggaacaacgcgcttacaactgactggcagaccctgacgtgggaaaccgatctcaccccggcaaacggatttgacggttcagcgttcggcctgtattgccacccgtctaacgcggaagtgtggatcgactcctttaaggtgtacgacatcaccgaagagctgacgatcaaggccaacagcgcggcgatcaacagcctgacgaccaccgttacccagcagggccaggacatcaccgcgcagtcgaacgcgctcacgcagctgaaatccagcctgaccaatgacgcggtagcgctggcagcgaacccggataacatgctgacgaacaccggcttcgagcgtggaacggacaactggagcggctggagttcacgcgctgacgtatacgctgctcaggctccgaagtccggcgcaatgatcctgcgtggcaagtcaggcggtaacgcgtcgatcggccagaatgtgctgggggcgaaggctggtcgcacataccggttcggtggttatgtgaagcgtacagctgatatggcgatcggcccgaacaccgtcggtaacaacaaattccgcctgggtaacgcgaccaccggcgctggccctatttctgagctgaacttctcagaagcgaatgtcggcaccgactggacgctgatcactaaggactttgtcccgacgtctgatattgacgttgcctactcgatcaactggaaccttgctaccggtgagatctactttgatgacgtgttctttatcgacgtcactgacgagatcaacaacgcggccaatgctacagccatcagcaacttgaccacccgagttactacggcagagggcaaaatcacgtcgcagggaacagcgatcactcagctgaccgcagacctgagcaccgcgaacgggaagatcacggcgaacgccaacgcgatcaccagcctgcaatcgactgtcacccagcagggcaatacgctgacctctcagggccaggcgattaccaagctgaatagcgacctgtccaacctgtctggcgtggtggacacgaaggccagcgcttcggcactgaattcactgactacccgcgtcacgacggcagagggcaagatcaccgccaacaccacggcgctgaccagcctgacttctcgcgtcggcaatgcagagtcagcgatcgacggcctgaacgagacgacagcggctaacggtctggcgatggcgaacggcttccagcaactgcgtgcgcagatcggcgacaaccaggcggccatcacgcagacgagccaggcaatggtggatcttgagtcttcaacggcgcagcagatcggcacaatcaaggcgtcagtggatggtatgagttccaccgttcagcagacttcaacggctgttgcggatatcaacggcaagctgtcggcgcagtggggcgtcaaagtccagaccgacaccggaggcggaaacccgcgcatcgctggtattcagctgggcatcgacgcaactggcagctcacagttcctggttcaggctgacaccttcgcggtgtacgctggaggcagtaacaaaacattcccgttcgtggtgcagaacggcgtggcgtacatgcaggaagcgctgatccgcgatggctcgatcaccaacgcgaagatcggcaacgtcatccagtcgaacaactatgtcgacggctccaacggctggagcatcaacaaggacggtggcgcgcagttcaacaatgcgatcttccgaggtcacattgaagcgcgtagcgggacgttcaaaggcacattgcaagctgagtcttttataggcgatattgctacttctgcatcgttcaacggatttactgtcaagggcggtgaaggttctggcactatgaacgcatggtatcagaatcgtgggtatccgatgaccatcacgctgaactgcactgtgcgatgcaattcatactctggcggcgtaggcgaccaaagccgtgacttctatgtggttctgacattcaacattaacggagtgcagagcacgaggcgcgtcgttgttgatatgcgggataaagcacacggccttgtggatgttccgcaatctttcaccgttaacattccagcaagcaacaaccggatcggcatctcgctgactggcgcaagttatgggccgcagcagagtgaagtcacagtaagcaacattgttgtgacggcattccgaagcagcaacggttcttttggacaataaggagcggcccttcggggccgatattaaatggcaaatattagcgaccaactcgcggctgatattcacaacgcattcagcaagtactacacagacctgacgaaccaagatcagatcttcttcggcgtcggtgatgtgacaatcacgaagcaggacggaaccaccgcaacagtgcgctcatggaacaaggtgatcggctcagtggataccgcagcacaacgcggagctgcgaacaccttcacagccctgcaaacgttcagcgccgggatcaatgtctctgccggaaacatcaacgtgatgaacgacaacagcatggtgatccttgggaaaaacagcgatcttgcgctgcttaaaaaatatggtcagggcggcaccattgccgtcggcagcggcacgccattcaagatccagcgcacgaatacagcaactgtctcaccggcttctacggtcgaggatattttgaccatcggcacggataagaaaaccacgctcaccggggcgcttgctactggcggcgatgtggtggtcaaagggcatattgataatgcggctagtgggaaggtgtattcccaggcaattgagctatcaatgagcacgccttacatcgacttccatttcaacggcagcgaatcggactacacgacgcgacttatcgaagcgaattctggcgagcttacgcttgaaggcgctttcatgtgcaagagacatctttatgcttggggttccgttatggcgagaaacattgccccgggcagtccggcgattgggcagccgatcactggcgcgccgttacagtcgatgattcaagggcgaggcgcgtatactgattcccgtggggcagtggctaactattacgtcgaggaggtggttgggtcagagcacaggatcgtcgcttacctcgacggctacgggagatcggacgcgtggctcttcagggctggaggcacgatctccacaccaaaaggcgacgttctcactaccggttcagacgtgcgcctgaaaacagacttcacccaagcgcctgagaacgcctgtgagcgcatagaacgattaggggtatgtcagtaccgtatgaagggagaaagccgcgtaaggcgtggttttatcgcgcagcaggctgatactgtcgacaaggtatatacctatcaggacgttgagcaggagatcgacggcgagcgtatcaaggtgatgaacgtcgactatgtggcgatcatcgctgacctggtggcttcggtgcaggagcttcggcaggaattgaaggatctgaaaggggaataaaaaaaaaggggccgatggcccctttctttacagcacgtgataaagcacgttgatcacgaagcccaacacgaggccgatcgctgctgccagtagcggctgtttcattttctcaaacatgctcttcaccctccactttaacgagttcatgccattcgatgcccaagggcttcgcaaggcggatcatggtttcaatggtcgggaactcacggccattgtcataacggcatacgcggcactgcgcaatgcctgctgctttcgccagaccacgctgggaaaatccagcgcgctcacggtgttctttcaaaatcagtgtgatgttcattttctacctcagaacgggatatcgtcatcaaagtccatcggcggctcgctggactgctgctgtggttttgactgctggcgcgctgggccggaatgtgtcttcggctgtccctgcggctgcccctgctgtccgccctcgctcttaccgcctaacatttgcataacggcgttaggcccgttcagaaccacttctgtcgtccatttctcgactccgttgctgtcagtccattttcgtgtttgcagctttccttcgacgtagatctgagaaccctttttcacgtactcgccgacgatctcagccagcttcccgaagacgacgacacggtgccattccgtttgctcctttacttcgccggtctgcttatcgcgccatgattctgacgtcgcgatcgtgaggttagccaccgcgccgcctgacggcatgtatcgaatttctggatcctgacctatgcgacccacgaggatcaccttgttaactccacggcttgccatttataacgctccttaaaaatcttcttcgacgtctgattgctgcggcggtacatcttgcggctgaacgtcatcaggtgcaacctggacggtagccttaccgcgtttagcattggctggcttgccggggttgaacggtctggcctccgcgtttttcagctcgacgatcttgctggcgcgtgcatcttcgacgatgcgcagtgatgccttgtcgctgcggaacagctcgcacgcggcgcggtagattgcatccacctcatccttgtccttcgcggcttcaatggagcggcggcagtctgctgcgctacgcactgatttgttgccatcgtcgtcatccatggtgaggccgaagatcgaaacgcgggcatagcggcgggcgtaggtaagcgttgagccgaagccctgggcgtcgttcttcgccagcgggatctggcagatatcggacagccattcgcctgtggcaacgtggatgatgcgcgtctccatcagcatcacgttcggagcctgtccggcctcgtgcgtcggagactggatcatgatcaacccggcatcttccattgccgggccgatggcggccgcaacgtctccgagggtcgcatagtggtttttcaggtgctggttctgcttggacttcttcggcgatacgcacatatcctgcgcgtgggcaaactgcttaacgatggtgctgcatggctgcgagaatttcatcatttggtcactccttatattgagggggtaatatgtcagtatattaccccggaatcaattattttttggttttcacatcttcccacaagtggcggaaggcgttttccaggtagtacggaggatcgaggtcaatcacgcttccgccgccgtaggtcggccacgtgtcattgtcccggcaccatttaaatgtggcgatggcttcacgcagctgcgcatatccaatcatcagggttttgtttgacaaggcgaaaggagcgacgacgaacgggctgctcttctcctgcgccagcaacatcgtccttctcggtttctggccgaaagccgccttaaatccctcgcgctgcaacgccattttcagcggatacccgagatcgaagcacttacgcatgaatctttcagggttggccgtgtccgtggtcttatagtccaccatgtcggcgaacttgctgatccagtcgaggcgcactttgcatcgcaaaccctgatagctgaaaaagatcgagacttccgacattccgtcgacgaaatattccttaaatgattcgttattaaacagaacggcgcgcatctcctgaatgatgtcataatcctgtccgcgaatgccttcacgatcaccgcgctcttcattggcctttttcacgatgtcgtgccagaaaacaacgtcagttatcccaagagctgcggcggtattggtgactgtctcaattaattccggctctttcattttcgaataaccggcaacaccgtgttctttcagaaatgccttcgcggcctcaagcgaggtaataaagttcggctgcggaataatatcgccattatcgtcacgcttaataaagtcctctttctcaggcatgcggaaatattcacgggcaaataattccggttcgaggtggttagcgtgggcagcagttccgaataccagtgcgcgggattgctttttcttttcctctgcgaacttccagttagccgggcatgtggagaacagctcccacaagcccgagccgttcatgtggtctgtctcagcgtgatagtcttcgttcgacagatcgttattcgtaaagaacagcacttcatcatcttttagcgatttaatatctgacattacatgatccccttattcatatctaaccgaagttttcgctcgatatcttcctgcctgacaaagcggcgtgaatcgcccttgcaattaactttcaatagccatttgcttttattctcaatagccggatacttcacggcaggatcgcggaatagaatctgaccaagcatcaactcggttccagtgggtacgccgcaaaataaaacctcccatagcacgtccctgataagattatttcccggcgctctatatgtgagaaccactttctttaatgatcgcataaggccgtaagcctctttgaatgttttgcggtcagtgttgcgaatgccgccgtgcaatattctgtgtaactctgcatgtgtcatgatgacctcctgtgtggtgtttgggcatattacttccgcataatatgccctgtcaaggctatttaattgagatggtcgacggcccgaggaagtcgatcaccgccagcttcgcgcagtggaagccatacgccaccgctgcgaatccgccttgtgctgacacggctgacaggcattcaacctgctccttgctgactggcgtcgacagcctcttgttctcccgcttcatctcgatcaccccgaacggctccccgttgcggccacgatgcaggatcacgatgtcagcgacacccttgcgtagtcccttcgcctgctggcgcagaaaatactgctttccagccgtcccgccgttctcgttcggcacgtggaaccagtacacgtctggataccaatgattaaaccaggtggtgaagttaatcaggtggtcatcctcaagcgctttcgtcagcttggttggtggatccagatattctttgatcacaggtcgtcacctccttcgaaaattttacgggctatgacgtcgcgagactttctgccgcctatacgccggtgcgtcacacgcttaggcgctgcaatcaggtgagcggacggcaggatcttcgtttttacccctttccgcatcttgccccgggtgttcggtgatgcaacgtgcttatccagtgccgccttccactgctgttttgctggcatgctgtcactgtccggccaaaacacctcataggctacgaagtcaggatccccctcattccccagcacgtagcggaacaccacgccgtttccgcatttcgtcggttcaacgttgaaggagcgcacgtccacaaagtcatcccgggtatagctctttttctcaaggctcctgtttgggtcgatcaacgtgttcccgcagtgggcgcactgcctggctgtgatgtcgttctctgcgccgcatccgcgactgaccaccacgccgcgatcgttcttaaagtcatcgcatgtgcgcgagacgaaccagtagtggcagcggtcgtccttgcggtatggcgtgccgtcttcctcgatcccgtcgtggtcgtacacatggcggcaccggcgcgcgtgcttgccgttcgtgtgtccataggggcattccttcgtctggccggtgctggtgtccgtctcatagcggtactgttcaaggaatggcgagaagtacagttccgccaggtcgtccagtgctccaccgtagtcgagaacaaggttgtcctctttgatcatcccaagctcttcgatgtggaatttcttgaggatgcgcatcccgcgaccgatgagctgaaccagcagagtgaggctgccgatcttgcgcaggataacgatcgtgtcccatggcgggacgttgtatccggtggtaaggcaaccgatctgaaagataaatttgcagcggttgttgaatgcgtcttccagtatccggtcgcgctccttctgtggcgtgtcgtcggtgatgatcccgtaagtcactcccggaggtaacacgctggccgcctccttacagtgcttcttaccggcgcaggtaacgagtacgcagttacggttggcggtacgcttcacgacgtcgagcatgatgttttgcgtgatggttccctgggccaggatctgcttctccatctcgatcaggtcggcatcactgaattcgtcgtcaccctcttcgccgcgactcacgaaagaatcaagctggtaggtcagctcatcatcgatcgcgccgtaatgggtaggcaccaccgcgccaacttcaaccaggtattcagtggagatgtcacacaccgcacgccgccagaatccgggggtgctcctgtcttcgttgatgatcggctgtgtgcctcggtagtcggtgccggtatacccgataacaaccagatcccgaccgtgcatctcccggcaacggcgctgcatctcccggatgataagcgtgtacccggtgcggccagcagcgatcatctgcgccaacgtgcgttctgcgttgcgctgcaacctctcgttttcaggattctgatccgcaagcgtgcaggtcatctcgctttcaacgatgtcgtctacgttgacgtgctggcattcgtcgatcagcaggaagcgcggcacgaagttagccagctgcttttcaagggcgttgaccaccgtcttctcgctgccgcaaatgatagggaaggtcgtggacttcatgcgcaggccagcgctgaacacgctgttctccaccccgaagttccgtatctccatggcgttctgcttgatgatcccgccctgacgtgacaacacgagcgcgggcttgttgagctgggtcaggcggcgggccaccaggctgatcagcgtggtcttccctgccgacacggcggccttgacgacgaacgggccgatctccttgtagttgttgatggcctgcgacgtcgcaaagtgtgccgcgaactggaacgggtaggggtcgtatggcatgccgcgaagtcctcgcagtagctggccgcgaaccgcctctatgtccgtctcctcaatcatttgcttgatgcttttcaccttttccattgttgcctcgttgacgtggtaaacattgcaatatattctgcacaacgaataccaaaacacaaggactttaaaatgatgaatattggcaaactacccgaaccagaaattcacgagggcgcgatacagcgggcttttgtgcgttctatgggcaactcattccagatcatgatcccgaactactacacccctgacaacctgggctatgaggcggatatgttctgtatccgcaagagccgctacacggtggaagtggaggtgaagatctccattgccgacatgcgcgctgacttccgcaaggcccacaccgtttacccaaagacagcggaggaagcagaaaaatactggcgatcagacgaaaacgagcgcgtcccgtacccggtgaagatgaagcatgactgcctgaaagctggtgagctgatagccaaccgcttctacttcctggtgccgtggactatcgcggacaaggcacgggagatcctgccggactatgccgggctttacgtgtacaaccagcgcggactggtacacgaggaaaagatggggccgatgctgcacaagcgtaagctcgatccgaaatatgaccaggggatcatggccaacctcaacacccgctacctgaatctgtggaggaggtcatgaagttctaccccattgagcagatagaacgactcatggtcgggcgctgggaggtgctgctatcccagtattgggataagcgcgcattcaacggcaggcatcaggcctgcccgctgtgcggagggaacgaccggttccgctggggcgaatcgaagcaggacgtcacgatgaagggtcgcggtgctgcaatttgcaatcagtgcggatcacacctgggcctgtggtggttcatgcaaactaccggctacgaattcccggtggcgctgcatgagataggggccaacttcctcaaggtcgagcctgaccaggaaatgacgaccgagccggtgatcgcccgcgacgcattcccgaaggctccgcgcgtcaggctggaagagaaaaacctatcagcctctcagaagtacatccgcaagcagcaggccgcgcctgactatgaccgccggttctggatggcctacgacctgatcgagacgatgcgcaaatatcacatgtgaaatacagttgacaggtatatggtgcccaagtaatatgcccgaacacccaacagaaggagcagcaaaatgtcagaacaaaccaccgtgtcaccgaagaccgccagcgcagtagccgaagaaatcaaaaaagctattggccgccgccgtatcccggtaattgtcgcagaccagccggccatcgcgttcatgatcgccaaagaggccagcaaaacaggctacggcgaagatgagcagctgggagtgaacgccggattcaccgagaaggacgtggtgaaccagatcgctaacgctgcgctgttcagaaagtcatataaccgcgtccagcacgtcgtcgtcatcaagtcgagcaaggcggcagcggctggcaactttgatggccgctacttcgtgaagatcatgtgcaatcgcctgtatgtcaccatggggagcctggctaactatcttgcgggggcggaatagtgagcggggcaaagtcgggggttatcggctgtcggaagatgatcaaaggcagcgagcgcggaaagatggtcggctgtgggacatacttccacgctggcgggcgcagcggacgctggcacgtgatcgacaatgtcgtggtgtgtaagcgttgtttcaaagaatggaaaaaggagcacaaagatgaagaaagcgatatttctgtttaaccgctcgcggcacatgttgcagccgtggttagacgctggctatgaatgctggacatttgacgggcagcttcctgaaggtgttcacgaggttgagccgggattgatggcggttggcatgtggttcgacgcctcagctaccagcgtgcatgccagcgacgtagccaggatcgtaggtggtggagtgaagttcatcgcctctttcgcggaatgcacatatctgaccaccaccggcgcgcgctggctgtatcacccggaagatcgcgatcttccagttgctgagcgccgaccacacccggcatacccgaaccgccgccgggatatggaggacgctgtgaagctggcgaaattcgttgagctggtggaggcatattgccacatcgttaacagtgatttttcgaccggcccgatcccgtggatgctggagaatccggctcgatcattcctgccgaagctgtggcgcaacttcaatcacaccttcaacccgtgtgactatggcggctatatcccggagggtgaagagatgcacccggactacccgggggtcattcctgaccgtgacgcctacaccaagctgaccgccatctggtgcagcgacgcgttcgtgatgcccgagccgaagccggtggagccggtaggcaaggacttcaaccgggcgatcaaggtcggcggaaagagtacccgcaccaagaacatccgcagcgccactccgcgaggcttcgcgctggctgtatttgaggcaaaccaccatgcataagttcatcatgacactggaagattaccggatgtttgccactcgtgaagaacaccgcgttatcagcgttgaagagccgccgattggcgatgcctgcatatcgtgtgagggccgccttgatattcacgtacaggtgatctcctgtcgtgagtggacgttaggcgggcagttgttttatgtgagcaaaatcaaatatcggtcaaataccccaaaggaagcgaaatgaaagacgaagctgacaaagtgactatcgacgcgttcgacgcagaccacaacccggcactgcacgcggaagccgcagcaaagggacttacgccgtggcagctgttcagcaatcgcgtatgggctacgaaggggctggtgactggcgggcactaccaggcagttcgcccgcagaaagtgaccggccgccggttcaacgggagcaagaccccggataacgtccgcccgaactggcgcacccctgagcacgtgttcgcgtggctggatatgacctacggcccgtttgaggtagatcttgcggcctgcgagaagtcgacgaaatgcgacttctacttttgcaaggaagagaacagccttgcgcaagactggagccagtttgatgcgatgtttctgaacccgccttatgacgacatcacgccgtggacggagaagagccgcgagatcaagccgggcgcagtgctggcggtggtgctgccgaacgacaacagcacagtgtggttccgcaacatggtggatcaggcctacaccatcatcaacatcgtcagcaacggcaagaactctggccgcctgtcgttcgaacacgctggcaccgggaagccaggcaagcagaacaacaaaggcaccgtgctgttcatcctgcgcggtcgtaagcgtcgcgccggtgtggagacgctctacatcgatcaggatcaaatgctgcgcgaactggggttactggatgcacagtaaggcgcaagtctggcaggccgcgaaggaatgcggcctcgacgaattcattaccgccgtgtcaaaagcgtttcccggcgctattgacggcgtggcgatatctgcgaaagggatcggtgttctggcgactgacgaccgcatgctgcgcaggctggtgagggttaaaccgggcgtgacgctcacaaagcaacaggtcaaggagataaggacgaaatctggtgttactatgcgatataaaggggaaaattgaggagtagcaccgatgggtaagacgtaccagcggcacaaggcccgcactgtatcgcgggctgacaggctgcgcaggatgaaccaagataagaacacgcgagtcatcaccaaatacatcgccgggacactagcccggctaccagaaggagaagatcatgacgttagcacaggcaatcttgaaggcatcaaccgaagggcgagatcttaaagtaggaaagggcgtagatcgtgagaacaagcacataggcccgcgtaacggtaagttctggactgacgaacgcattcaggaagtgaccgacgacgtcaccgttcggcggatgacgaaggcgcagatcatggagaagcacaacatcactgaaagcggtttttacaacgcctgctaccgttttgggatcccgacaacaaaatgaaaaaacataccgttattcatatcgacacggctgaatttcataatgccgtctacatccttggtcgtgaagagaagatctataactggaaccagaacgtcgagttccgcaaacgccttgttggcttactgggggagattgcagcagcgaagcacctgaacaacattcacggccgccaccggatcatcatcccgatgggagtcaacgcgcgcaccggcgtatcggttaatgcgttcggccagggtgacatcatgaccatctcacgcacagggaagcgcgaacggcaaacgcacgtctatgaggtgaaatcaaccgagggcatcggcaagcagttgccaaccatccggcaggacaacgctgaaagctacgtgatgaacggcgttgatgcaatcattctggtggcggtgcagatcaacaaggcgaaggcagagtgccggatcatgcagcaggtgtcgccggtggaggtgatcgagaagtggaggccgatggttaaccggtacggtcaggagtgttatgctttcaactaaatagactttgcgcttatcatggcccccgttaacactcacgggggcttttcttttgggcgacttcttccacggcatcaccgacatctatcggatgtataagaccgacttagattaccccatcgctgcggccgtcatggctacattgcgtcacatccagctaggtcacgaaaggcgacagatctggactaatgcgatcatggtggcaatgttcgcgaagggcatcaccttcatcatcaacatcatcggggattccgttccgcgaatgcactggatcgcaaaccaggatgcaggctggatcgttgcctgcgtgcttgggtacgttgggatcgacaaggtcattcgcgtggttgagcggtatttcccgtccatgaatctcagggggaaaaatgatcggcaaccttaaaatttacctgctggcggcacttgccgcctttttgctatggcagggcggcagctatgcactgacaaggtacggcgaaagccgttatgaaagcggcgttacagctgggattaacaaggaggctgaacgcagaaacaaaattgaccgtgatctggccgaaatgcgccagagggagaaagaccaagatgatcgcgacacgactcgccggattgaccaagcacgcgctgacgctgctagtgctgcttatgctgctgacaggctgcgccagcaactcaactcagccactgccatcgcaaaacaacgcgcctccgctgtcggcgttagcagtgatgccggaacgctcgccgatctgctcgccgagctgttctatcagtcagtgcaagcgggtaacgaactggcagcagaagctgatcgatactacatcgccgggcagcgctgcaacacccagtacaaccgactattgcaagcaacaaggagtaacaaatgaggatgagtgacaacgggctgcaatttacagcagcatgggagaaattccgcagcgcgccttacttcgccaccgaagacgagcgccgtcgcggtatctacacctggggcttcgggcacactggccgcaaccctccacgcatcaacatcacgcgagaagccgcgctggcgatcctgcgtgaagacgtagcctatgctgagaagaaggtgaacgagtgggcgcacaagtccatcacgcaacccatcttcgacgcactggttgatctggtcatcaatgccggtgaagagccaattaagccggacaagaaggcgggagacttcgacgacctggtgacgcaaggtcgctgggatgagctgatcgtacagctggagttcttccgcaagcagggcggcaagatcattcccgggctggttcgcagggcactggcgcggcaggcgctggcgaaggggatgaactggcgggatgctgaggccgttggccggaacgcgaatgtgtaaaaaaacagggggccatttggccccttgtttttagttcagaacaatgaaactcaacagcagatagccaggcgcgtattcgccaacgttggcgatgtgagtcacctcaaccctgatcacccttcctgtgtatccgccgatctccgtccactccctcaacatcagggtgtcgccctcagcgtaatcccggtcgaacttccttaactccgctcgttttttaccagaaacagccgcgttaaagtgaaccgggaggattttaagatcgtggatcacttcatccctcccacgacctcagcgccgatagccgcgtacccagcgaggtcttcgaacgagtcggtgttgtcgtcagtctgagcgcggcagatctttaaaatggattgtagcgtcaccacgtccaggccagtcagcggcatgttctggcggttcgcagacgaacgcacgatattgaatgcgtcagctacgcggtcgaactggcgctctttgccgttctccgcgccgtagcggcgaccgcgctcctcaaggtggccctttaccttctcaagaacctgggcggcgtcaagaggctcagaggagcttttaggggcatcggccttttcggcgaccatgtagatcgcggttccatccgtgcgagcacaatcgcggttcagtgtcgcgatgttgtcgtgagttagcgccgactcatcagctacgccgtggtggcggaagaagttggtcgggaattcgatcacgttagggactgagtattcaccgtgctccaccaggcaatgccagcgggcgatgatggtttcctgcccggaaagctcaccgtaggataggaacgtcaccagcgagttgcggcccggaatgttgctgccgcgcagaggatcgttgccttcatccacttcgtaccagaagcgcaggatgtcaccagcagtgaagcggtcggtaacgtcagttgtttttttcttcttggtggtcatgttcatttcctcagcattgcattagtgttttgcgccagtcggcgctttcgagatcgacgtagtctagcagaacaggcaccccttctgaactccaaaattcagaacggtaattcacgaacggctctatgtcgtaggcatatagcgcgccatccatatccaccgccacccaattcgcccagcgcggcacggttatgaccatgccgttatagttgaataccttaaacagcccgttagtgatcagcttcataatcatccccaaagcacggaacgcgcgggtaggtcactggtgcataggcctcgatcctgaaatcgcggtttctgtcgagcggctggtagaatgaactgaactccgggtgaatgccttcatggcaccagccgacgaagaagaacggttcgccgccttcatcggtgcggccgtcccagcacgccagctgttcatcggtgtacccgcattcgtcgaaattaacgtaccagaagcggcggatcaggcggcagttgttacgcagacgcaccaccacccaaaactccatttcatgcccgtgctcaatgtccggggtgtcgcccaaagaccagactgacggcaagaattgttcgaatactggctctttctgtttcatttgcaaaaatcctctacgttgatgaagtcgggggtcatgaccatgtttccagaccgtaggaagctcaggccgaagcggtggatcagcgtgctgcactggtcgatgtcgctgtagtgcatgcgacgccagaatcctttcagtgtcccgacgtcgtcccagcgcacttgcgggcggtcgatgaactcagcgcggacgaaccggccatagtgccaaacccattgcccgggcttcacgtcggcgacttccacgagccttgtggggaataccgggatcttgctcatcgtgctttcacctcgccgtagtagccaacgtccatcaggtcggatacgaccgcgatgacctgcgccttcgcatcatcgtctgccttgttgttggcaatggccttcatcactgcgctgcgagtgacgtcgaacatcggttcggacacgttacccttgcggtagcgctcacccagcttgcaggcgtccttcatgaccttatccatctgcgcgttatccggcaggcggtcgtatacacccaggtcgcgctggatattgatgttcttgatgccaacagcgcagctaacggcgctggcgtccccgacgtatgagcagcccagcacggcggctgcggcgatggcgatggcggtgatgcgtttcatcggttactccttgtttccacggatggcggcgatggtttcaatgtggcgacgctcttctatgcggcggcgctcttcttcggcggcgatgttgcgcatcaccagcagaaacaggatcgccagcagcggagatatcagcagcgccagcagcgaccaacccaggccactgcgtccgcgacgatcggcagcgatacccaccagcacagccatgacacaccaaataattaacacgctcatgattctctctcctgttagtcccggcaccctgccgggatctgcatattagtacgggataatatcccgtgtcaacactatagaatgattccagcgccgtgagtgtaaacggtggcgatcgtcatcaactcaaggcgcagcgacttcaacgccccggcggcggtctttgcgtcgatctcggtgacgtggttctttgagtcggtataagacgccttaaagcggttgtgcccgtaggcgatgcagcgaacgcggccgaactcgacgacgacacggtaggtcgtctcctttgtcttgtcgttgacggcttccagtactgcgaactgcgcgccgggcatgagcatggcgcagatatgagcaccaagctcgcgggcttcgtcgcggctggtgatcttcttcatctggtcaatcatttcgggcctcctcgcggcctgctggcgtgatctcgcacgccccggtagttatgttccactttgccagcccacggctgacaagtccgttcagcgctgtgatggtatgtgacttgctgtcgtatacccaatcgcctgcgcgccattctgagacagcaagccgctttaatacggcccgctgcctgatacgcagcttcactccgggcgacccccggcagccaaccaagcagcgtaagcgatggagcgggtcagatcgcacttcatggtgatcttgcggtcttcatcagcgttgacccactgcgagaacgtcagattcagaggcataggctcaccctcagcggctgcgagcgcatggtgatagctgttcagcgacagcagcagggagacgcgctgccgggcagtcatttcacgcatgatcgcccgcacgcacatggaggcgctcccagccccttcatgcttgcgctgtcggccatcccaaaactggaatttcatcgacagcggtggtcttttacgtccgtccataatttcctcctgttatgaaatatattcgacggtttcaggaattatcgccgcatatttgcagcgttttagcgctggtatgtaccagaaagaaaacatccgttcttcgtctgagctgtcgtcaatgtcaacgtgacacaaagacgcctcatagacgatcccgctggcagcggtgacgcgaactcttgggtagacgatccccttccatgcgccatcaatgcccttcatgaacttgttggcggcttcgtctgcgcgaatgaacgaatgttggtcgtggtaatggaagaaagcgacctcagcgccattaacgacgacggtgacgcatttactcataggctcctccggttgtggcccccgaaggggccggttgtttcagcaggcgtaatcctgtacgcgaagcgcgtagtcgtaattggtcagcccgattgagcgggcggcggtatttatcagaaaggcagctcgctatcgatccccgtcaccagtggacgagccatcatctcaaggtattccttttgggcctgctcctgcgccagttttgcgagacggcgaacgctgaccatcagtttaacgatgaagcgggccgggtaacgatcgagggcaagcagatcctggcgaacgcggtcaacggcacgctgtacgccgatgtgcatcaggtagccgttgtgggtgtagtggcgggcacactgaacagcgcggtcaatgatggcgtttacttccagcgcttcggcgtgtgcttcctggcgggctgcgtaggcgcgctggccttcaacggcgtccagcagtttagccagcagcgctttcacgtcgcacagactggcgttagctttccactctgcctggttccagtcgtcgaggttagcggagatgtaaccttctacagcctgctgcatatcgtcgtacatcgtatcgtcaagggtgtcgacgttttcgcagatcagcgcgttcgctgcggagtcgatgatcaggcaggccagcaggtcggcattcttgaactgtccacgggcttgctcgttggtcatccagcttgcaggattgccgatggtcagatccagcgcggcgagaatttcgttagcggcggtaagatatttgatagctgacttagacattttgcgaccccttgtgatttatcggttagttactgcctgttcgataaatatattataggggccgcatcatgtcaatagtgcttacactactccttaatgaattctttgaaatctgcggacgatgtctcgcgccaggtcatcagcctgccgttaatgatcgcgtgacgctcgcagttgtaatcatccctgaatttcagaatggtcatggtgttcaggccggtcttggtggtcagcttgcgcatgctgcccgctttagcgagaagtgcggggatgcttgtaacgtggcaaatcaggctcatgttgttttcctcagtggttatcacggcagctacccataagcgggggaacggcatctttgatcgtgtagtaagggttccgggcttcgtgtgggttagactctttgctcaggtgtcccagctcagccattttgtaaattgcgtcgcgcactgactcccgggaatacggcgtcccgtcagccttaaacaccgtggagctgatacggtgcaggatctccttgtatggcgcggttccgtgcggctccgccctcagcagagaatacacggcttcctgcaatggcgtgtacacgtgcgcctgacgcttctcctccggctcaaagtgctcctcatccgttccggcgtccatatcgtaaacgcggtcttcgaacagccataccttcgtcgcgtcgtcgatgtagatgaagtctggccgatcgacctcctgccctggggcaagtttcttctcatacgtgcttttcttcttcgcctcaacgtccttcgcaaacaccggcacctgaaagcctttgagcttaaagcgccccttcaaaccaccctggcggctcttaccgacgttcaggacggtgtagcctgtctccttctggcgggcgttcaatcccttaccggtctgtgtcttctcgcgcaccaggctgaacgttttatacaccgcgcccttcgctgcggatccgccacgagactcaagatcatactggccggacatcaggcttcccttgctgacatgcgggatgaagatcccggcgcagttgagtgactcagcgaaccggtgcccggcagtggtgatcagctgctggtcggtgttgctgttttcgtccatgctcacgccgttgttgttggccgccgccaggtggaacattttgctgtcgaagatgaccagatttaccggcctgccgttggcgaactgcaacacgcgactcttctggatacgcaactttcctggctccatcaggtcggctggtcgcttgaacaccttgatccagtcacggagattgacgccggtgcgcagcgaccaggcggccacctgcaactcaacgctgtctgggtcttcggtgaagaacacgctgacgccagggttacacacgcggaagcagttgaacagcgggcgacccatggcgaggctaacagccatttgcaccagcagcgtcgttttccctgcgcctgcatcaccgttgatctcgttgatggtgcggcggttcagcagaccttcgatcaccgggtcgtagaagtccggcgaggtgttcagcacgtattcgcccgggtcgtaatctttcagcgctggatcttcgacaagtccctgctcaacctcttcggcgagacgctttgccacctcaacgcgttgggcggataagtccatcccgagattctgtttttcattctcctcgcgaacgatgcgttgcagctcaaggtggcgctgaccggcgtctttcttcttcggcttaggtggttcaggtggtacaggtggcgatacttcttccgcctgttcacgctcctccacctcagcacgtgctacctggtcgaagtaagcctgcatgtcggccatttcctgcgaataggcttcgtcctcttcctcgcgggtcattggctggttgagaatgtccgccgcttcgtgctgtttctcctgatcacccagtaacgccttccagtcgtcgggcgtcatcggccttttgttctcttcgttcatcgtttcctcctgctttggttcggacattattcacggcaggtaataccgtgtcaatatcaattactttccgcctgaaaaacaggctaaaacctgtaaaccaatactatttatagactgtaaatacccgctattgggattttcatcacgcctttagttttcaatggcttacagagtacgttttttgagcagctgtaaaccaaagcgattcaagcggagctactcgccacctcaacgccacctgaacatcaggcggacttcgcaagttgttgataacaaaggactacctgaaattttcaggaggaaaagggtcatactaccgaagttgcaagtgtctgatattgaagggttaatttcaggtgttaggtggtatccctattatatataaaacccatataattacagaaacacgtacacccttacgcac

SEQ ID NO: 67 - DNA, 48253 bp, unidentified
  source 1..48253: mol_type = genomic DNA
atgggggaagaaaaaagcgctacgcagtggctgcgcgtttttattctccccaccatgccgtataggggtaaactgaggcagagccacttgaaagaggaaaacaacatgactgataaggtgaaggtaacgacacctcggaacccagtcggcagaccaaccagctacaccgaggacatgccggaaaaactccttgaatatttccgtgtcgacgttgatgactatatccagcactcacacacgacagccgggaaaagcaacattcgcattaacccgaagcacatgccgtctattctcaacttctgcgaaagcatcggcatcacgacgacaacgtttcatgaatggcgttcgaagcataaggaattttctgtcgcttacacgcaggcgcgcgagctttacgagcagatgattctgaatattggcttcgccacgaacagcactttcgcgaccttcatgctgaaagcgaacttcggctaccgcgacaacactgagatcgtcgtgaccggtgacgccaacaagccggtgcggttgaagatcgtcagcgagcggccgaaggatgagaagccgcgcgaggagtccgaggccgtcgactggggtgacgactaaatactgcttgacatatatatgactgagcaggaatataggggccgggcaatcctgcccctactgcacaggacatcaaaatgactgaatcactgaaattcacctccccggcaccggcaccagttagcggcgttctcgcttgcgcttcccgcgaggcaggtgcagaaaataacctcaagctggcgcgcgccatcgtagtcgaggtcgcagaccgtggcgctgaccagcacgtgaaaataaaagtcggcaccctgcttgccctggcgctgggccttgagggcgtcatgaaggttatggcgtcgcttgaggctgatcgcgacagcaagatcaaggcgctcagcgagtgggaagtgttcggcgtcgaaatgcttgagcagaagttcaagtgcctgccggtggtcaacatgaagccggaagagaagcgtaagcgcattgccgctggtatcgacacgctaacgcagcgactcgacgagcgcagcgaagacctggctttagtagatggacagctgaacgaatggcgcacgcacacccggcacgtcctggatacctacttcgccacctaccccaccagcaactccaacgaccggaatcttcgcctaatcatgacggcggcgatcgaaagcgcacacaacaaaaacaagcagctgaacaaggactataacgccatgcacgacagagcctacgcatcagaccagctgcgggaggccgcagagcgggagcgggacgacgtgatcaacctcaaccgcaacgcggcggaagagatcgcccacctgcaaaagcgcaacgagcacctcgatcagactgtcgtcgacctggtgcgccagcgcgataagaacggccagcaggctaaccagctggctaacgagctggtcgagaaacgcaaggagatcagcaggctgttagaaatcattgaccgactgcacgcagagattgcagagaagcgcgacatcatcggcgcagcaacgctacgctgcactgcgctcaccaatgacgcgaaggcgatgagcaagcagaacagcgacctcgcagcacgcctggctaacgctggtctggagatcggcagctataagcagctcgtggaagacctgaaagcaggcacagcctttgaccgtggcaccgtgaagcgccaggaggaaaccattgatcgcctgtatggtcagctcaatgagtggcacgactgggctacagacgtcatttgtagcccgtcatcactgggcggcgaggcgcagcgtactgccatcaccgcagcgatgcgcaagcgcaaggagcgcgttgagtcactggagcagatcgtgaaggacgtcgttgcacagcgtgacgcgtgggttatttgggcgcgcgggtacaccaacgcaccgacaggcatgcacagcaccgaacaacttctctcgatggtgaaggcgaaagtgaaggcgatcacagagggcgtcgacgggccagcggagcacaccatgtgcggcacgatgaaagtcacccaactgaaaggggatgtcgttgccagcgatggaagttgggccatgctcaaacacggcaacgcggtgatcgccggaagcattcccgccagcaagctgaccctgggcgaggagatgaaagaggccattcgcgaagtcgtccgggaggagatgagcagcgcgttaaagcaagccatcaagaacgaacttgataagctgaccatgtaaaccatcaaatcatcaaccagcggcccacgacgggccgcaatgaggtgaatcaatgcagaccttctacccagtctttagcgccattctgtgcctgttttgctttctctgctgcaaagggtgggcgacggccctggacatcggagcagggaaagacaagcgcatgatcatgatggcgcgcaccttcgacatcgctggcgacgtgttccgctgggcgtgctggctgttcatcgtcgcgggcttccttcgcaccctcggattgttctgattgcttacaatttgtaccatttgcccggttgatcaccgaagtgactgactgataggctttaatgagactcgcagcgaggtggaaataatggggatcgtaatgggtgtgtggttggcgctggtgacagctatcgcgatgatcgcaattcacatggccgcaatggacagggagcggctcaaggccaacccggtcagccagatcaccaagctggtgctcgcggtcttcctcctggtcggcgtagcgcacatcgccaccaggtacacagctttcctccgcgtgctatcctgacctgacaactgctatcatggccccgttaacaaaacggggcttttttatgtctatccaatctgacgccagtcaattcattgacctgacactcacaccaccgcagaacgactttctgcaactgtcgtgcaaacacccggccttcgtggctggcttcggtacaggcaagagtcagaccatggccgtgtcgtccgtgcttgacgcatcagagggtggcgcagatgccacgatcgccatccttgagccaacgttcgacctgtgcaagctgatcgccgtgccgcgtatcgaacagatcctctccgaactgggcattcgctttaagaccgtcggcaacaaggagatctacacctcccacggcgggatcggcgactttctctttcgctccatggacaacccgactcgcctggtcggctgggaggcgttccgcgtccactgcgatgagatcgacaccctcaagaaagaggccgccaaaggggtatggcgtgcagccattgcccgctgccgtcagtcaccgaaggagtatgagccgttcgacttccttccgtcagaccgcccgctgaacagggttagcgcctactgcacgcccgaggggttcaacttcctgtatggccgctgggcgaaggacaaggagcgcagccgaaaggccggttatctcatgatccaggccgccacctcatccaacccattcctgcctgccgactacctggacgccctgcgcgccagctacgacccgcagcgcttcgaggcctacgcgaaggggcagttcgtcaacctgaaatcggggacggtctataagaactttaagcgcgagctgaatgacaccgacgtggagatcataccgggcgagacgctgatcgtcggccaggatttcaacgttaacaagatggcgacagtcgtctacgtcgagcgctatggcgaggacgggcttgccgaactgcatgcagtggatgagcgacacaacggcatcgacacaccggacgtcatccgctggctggtcgagaagtaccagaactcgggaaatggctacatccacccgatcgaggtctacccggacgcatccggcggcaacaccagcagcaagaacgccagcatgtcagacctgtcgatgctcatgagcgcagggttcgacgtctactgtgggcaggccaaccctgccgtgaaggacagggtgatcagcgcgaacaccctgttctgcaacgccagcggccgccgtcggctattcgtgagcagcaagcgctgcccgcaattcgtcgaatgtctggagcagcagatctacgatgacaagggcaagcctgacaaggaggccgggaaggatcacatgaacgacgcaggcacctacccggtggtctataagttccctgtcgtgcataatggcacgatctcagcaaataatattgaatgggtacgatgatatgacgatcacgacactgccgcaggcggggacggtatccaccgaacacccgctttacaagcggttcaaccaggaataccgcactatcgaggactgtgttgcaggacagacggtcatcaagcgtgccggtgttctgtacctgccgaagcccgaagcgtggacaatgaagcgttacaacgcttacaagcgccgcgcccacttcctcaacgccacctatcgcacgcagatgggtatggtcggcatcgcgttcgccaaaccggccacctacaccttgccgacggccatcggctacctgtcgaccgacatcgacggcgaagggctggacatggatcagctcgttcgaatgtgcgtagcgcagaacatcaccttcgggcgcggtgggctgctggttgactatgacgccccggaggacgttgggcaggtgactacgctggtcaatagtggccgcgctactatccgcatgttcgaccaccggcagatcatcaactggcgcaagagcggcggcaaatattcgctcatcgtgctgcgctacctggacgacgtcgactatgacggcttcgagcactatcaggtggttcgctaccttgaactgcggctggtggatggcaaggcatattcccgcctgtggacggacgaactacagggtgccgccgggctgccttcctcggtcattcaacagaacgggaacatgaaccaggagcagccggaactgcgcccgatcatggctcgcggaaagcagctcgactatctgcctttctgctggttcggcagcgagaagaacgacagcgacattgacccggctccgctgtccgacatcgcgaacaccaatatcgcccactacaacgccgacgccgacaacaccgacagctcgtttatctgcggccagccgaccttcgtgatcgccggtgtgccgcagaacttccagaaggacaatccgagcataaaggtcggcggtgacgaagcgatcattctgcaatccatgggcaccggcacgcctaccgccagtatggttgttgcaccaccgaacaccccggccgccgcgctgctggagaagcgtgagaagcagcttgccatgctgggcgcgaagctggttgagcgcaacggggcaacgaagaccgccacccaggctggcgcggatgagaaaaccgacaactcgatcctctcccagtgcgtcggcaacgtcgaggcggcgttcaatcaggcgatggagatggttaaagacttcactggcaccgaaggcgcgaacgtccacatcaacaagcgatacgaagatatcgttctgaacccgaccgaactgacagcctacatggcggcggtgcagtcagggatgatgcgtatgatcgacttcctcgcgtggcagcagcgtatcggcctgatcccgaacgacgcagatctggaagacgttgaacaggagctgaaagacggtgccgaagaaacgcagctgatcttcaacgcggctgctcgccagacccagcaggggctggacaacccgcaggaagataaagacccggaggaagacaagccgatctctaagaagaaggccagcgcgccgaagaagggggctaaatgacatccgttaactcgcggatggcgtcggaggcggtaaggcaccgcctctacctctaccgctacagcgaaggccaggcgaagaagatgacccagctactgcgccgaatgtccgtggacgtggtaggccgcctgctgtatgcgctggacgactcaaagatctccgccgacaactacacggtgaagcgtcttgaggccatcaaagcagccattaacccgacgatcaaccgcatctacaaaaccacctacggacagctcaaagccgaccttgaggcgctgagtaacggcgagctggcgtaccagtaccgcacgtggcgaacgctcatccctaacccggtgcttgacttcgtgggcgggctggtggagatcccggaaacgcaggtatgggcagcggcgaacagtcgtccgttccagggcatgcttcttcgtgacatcccgtcagtgctgggtgaggccatgaccgactcgatcggtcgggcggtgcagcagggtatcttacagggcgagacgtatgaccagatcattcgacgggtcaaaggcagcgcagcagcgacctacaaagacggggtgatcggcaccaacgagcgccaccttgccaccgtcacccgcagcgcagtgtcgcacgtcgcagctgaggcgcgggacaagatcggcgaggcgaacgcaccgctcatcaagtcagaacagtggctgtctacgctggacaataagacgtcgaagctgtgcatcatccgcgatcaactgctgtacatgcgggacaagaagcacacaccgatcggccatagcgtgccctacggtgctggccctgggcggctgcacatgaactgccgtagtacgtcgaccttcgtgttcaagagctgggaggaattgggcgttccgggagtcaagatcaagggagcgtcgcgcgccagcatgaacggacaggtgccgatttacatggactattcgagctgggtggagcgccagcctatgagcacgttaacgcaggtgttcggcgtggagcgggcgcagctcatccgcgacggtaagatctcgccgcctgacctgttcaacgacaagggggagtatttaacactctcccagcttcgcgatcttgaccgtatcccggcagaagactaacatcgtgccgttgacaacacaggagctatcacatgtggaaatacctgattaacaaagaagcgtttgacgccctcacccctgaacagcaggccgcatacaaggccgtcggtgattctggcaactacgtgatgaacatcgaaggcatgcctgacgtgcaggccatgcagcagcagatggccgatcttcaaacccgcctgggcaccatcgacgcagagaaggccgcagaagcagagaaggcccgacaggcagcgcttgacctggcgaagaagaacggcgactttaagaccatcgaagaggactataagcgccagatcgccgacctgaacggcaagatcgagggcttcggcaagcagcgccgcgacgacttcctgaacgcgcagatcgataagctggccgcagagctgggtggcaaggagtatgccgcactgttcaaaccggcgttgcagcagcgcctgtctgtcgagggtggtgaagatggctccgacttcatccctcgcgtgctgaaagacggcaagccgtcggccatgtcactgaacgacctgatcggcgagttccgggcagacccgacttacaagccggtgtgcgtagcgcctgcatcctctggcaccggccgccatcaggcaccgaccccgacgccttctgcttccgacaagctcccgagttttgaagatgtgcgcggtaagcagctgagccgcgcagaacagatcgcggcaagcatcagcgacgcagagtaagtaagcacaggcccggcattgccgggctttttcttgcttgtccagtagttgccggttatcatccagacgtttaatcactcaaaggacatcgcgcgatgagctttactatcttccaacgaaaactgatcggtacgaccgttcagcttctgactgaaaacctgaacgtgttcaacgcggcttccggtggcaccatgcttatcggcagcggcgaggttatcaaggaaaccatggagaaaatgaccattgggatcattgacggcctggtgcaggatcgcaacgaacacgccccagttaacactgtggttcagccgaaggtgctttcccgcatcctgggcggttccatcaactccgctggccgccttgggccggtagccatcacctccggccagctacgcctgatcgagactgacgtgaaccgcgcggcagccgagatcgcaaccctcgcgtcggaagccatgctgaaacgctacgtgaccgtggcaatgggtgctggcgtggctgcgatcgaagcgttcggtcagggtatttatacccaagacgcttacatgaccagcaaggccggtgaactgtatccgaccatcgaagacttcccgctggcggcgtccatcttcggcgaccaggccgacctgattcgcacctggttcatgtccggcacccagtgggcgaagttctccgcccgtgaagcggtcaagtccgccaaactggtgtttgagctgggcaacatgaagatcttcaccgatggcttcggtcgttcgttcgtggtatccgacgcggcaagcgctggcatctctgcggcgacctccggcggctccgcgatctacgcacctgatcatgcgattgttggtctggccgccaacgccatccaggtaacgaccaccggcctcaaaatggctgctgacccggccaagctgggcggcgagaacattgaaagctggtggcaaggtgagtttaactacagcattgctctcaaaggcatgcgtcctaccatggcgttccgcaccgccaccgaaggcaagaagactccgaccatggccgacctggtcaagaaagagaactgggaagccgagaagggcgaaaccgaccgcaagccggttggcaacgacgccgatccggtggtgccgactcgcaacgtgcgcgagacgctggggatcattatgaagctgaccccaactaccatcccggcagaacacgctggtgtgtaagcgaagaagtgaataatatgggggccgattggcccccttttcattggagcaaaatatgatcggcaatctggacgacctgaaagcattcgctgcggccaacggctatacgggcatgaccgacgaggagctgagcaccgcgctccgccaggctaacctatggctgtggtcactgtcatggaagggcgagcaggctgaacccggccaggcggacatttggccgcgcactatctgcgacgactacaactgtctcgactacgacaccccgccggaagtcctccgctttacttacaccatcgtgtgcgacgccgtcgactctggaacggagttcaacaccgcatcggctggcgcgtataagaaacgcacccggatcgagggcgctatagatgtcgagtacagcgagcagagcctatacagcgcaggcttcgaggcaccctacatgatgggcatgatcgggcactggctggaaggcaacgggcgcggctgtaacgtcaagatggagcgcggataatgaacaagctatatcgtgaactgcgggcagaggcccgcaagctgttcaaagagtacggcgcagtcatcaccatcagcactcctggcggaatcagccgcgacccagtcaccggcgaggaagtggtgacgccgccgggcgcggtatgcaaggtgctgggcgtgatcaccggcgtcgacctcaagttttgggggctggcgaccatcccgccgggcgagcagcagatcgtcatggcatggacggacaccacagggaaggagtgggagccgaagatgaatatgaccgtctcaggtggtagccgcacgtactccatcaccgagattaagccggttatcccagacggtggctacggcatcgtgtacaagctgaggatcaaggggctgtaatggcaagcaagcggaacgggacaatctttgccaacaatgtcgctcagtgggctggtggggtcgtcgagcgtcacgaagagatcgtgcagctggcggcgatgaaggtgtttgcgatgatcatccagcgctcgcccgtcggcaaccctgacctgtggaaccgcaaccagcaggccgtcaaggagcgcaaccgcatgagcgacctacgaacggccatgcgcgaaagcgacaccttcggctacacgaccaagcgcggcacccgccgcctcaagccgggcgcgaacatcgttgcagcaccggcgaaattctcttcccctgtcgggccagtcggcccgcgcatcccacgacttctcaagaatgagcagggcgtaaacccggtcgggaagggctacgtcggcggccggttccgggctaactggcaggtggggatcgactttgtccctattgagtggctggatgaacgggacaagtcaggcaccccgaccatcaacaaaatggtgaacgccgtcgagcgattccgcgtcgggatggctgagcatatttatttcgttaacaattcgccgtatggctacccgctggaatatgagggacactcacgacaggctcccgccgggatggttaggatctcatgtatccaatttgaggaagcattcgcgtcagcaacagcagaggcacaaaaattatgatcagcacttcacagattcaggcgaaattcgacctaatcgcaatgcagtgggggaacaacaacaatatcgccctcgtgtggcgtaacagcgccgataacgacatgaacgagcaggcggtgagtcagctggtcggcttcccgcagcacatcccggccccgtctatctccatgggcttccagcagtcagatatcgcgaagcgcgggatctatcaggtgatgctgcgtgctccgcgcctgtccggcacccggcagatctacgatgcagccgatgcgctggtggaggcgttcaatgaagcgatgttctatgacggtaattatgttagcatcggcgacgatgatcagcagctataccttacggcaccggctgaaatcggagctgactatgaagacgacgccgggctgcatgtggctgtcacgatgaactaccgtatcaataacgcaagaggctaacatggctacgaaactctcatacaacatcccgaacggctccacgctgcaaatcgctcagacgatgggcgcaagccttgccgtgtcgggtatctccaacgcgaaagaggcagtagccacccttacggctactgattccagtatcgccgctggcgactacgttcagctgtttaccagctgggtcaatatgaatggcctggtgtgtcgcgtgaaggcaatcacctccggcaaagtgacgctggagaaggtcgacacctccgacaccgacatttacccggcaggcggtggcgcgggtacgctggtcaagatcaacgcgtggatcgacctgccgttgaccccgaccatctccaacgctggtaacgagcagcagaccaccacgttccaggctatccagcacgagcgcgcggtgaacatcaacacttacaagtcggcggcaacgcagaccttcaccatggcgcacgacgccagcgcgccagtgcgtgaagtgttgaagcagctggatcgctcgcaggacgtgacggcgttcaagttctacaacaagcgcgcgaaagaaacgcgcgtttatggctgccaggtatccttcaacgagatcccggcatccgaagtgaacaacgtcgagacgaacagcctcgttctgagtctggtcagtgagatggtgatctatcctgccgcgtaaagcgtgctatcatcagggcggcttaggccgcctttttcatatctggagataatagacaatggctgcaaaattcaagttagtacccgctggcacgttcaaacacacgatcgaaatccccatggcgggaaccgatgagctacagaagctgcaatttacgttcaagcgactgaacaccgaccagctgaaagaagtgcagaagggcttcgaagcgcaaatggccgaactcgaagagaagtataaaaacactgcgctttcagccaccgagcgcgacgtactgctgcgccccatgatgatcgactacatcatgaaagtggcggaaaactgggagctgaccgaggagttcgcacctgaaaacctgaccgttctgctggttaactacccgcgcgcgttcgaagcaatcagcatccagtaccagcgcgagctgtggagcatccgccaaaagagttaaccgccgcgattgagggtttatatttccccgatccaccgcagcagctggtcgacaacttcgggggaacgctggaggactaccgtccagaagtggagctatcagcagatattgttgatagcttttatttttaccagcgtattgatacccaatggcgcacggggccgggcggtttaatcggcctcgactacacagtgatccccatcgtggcgaagatctacaacgttgaggttagcgcggagttaatggatgatattgccacaatggaggcagcagccattaaaaccatcatggggaacgttaagacatgagcgacaacactgaacgcctaatcgtcgacgtcgacgcgagtggggtcaatgccggggcgaagtccctggaagacctcgttaccgcagcgactggcgcgggtaaggccgccgatgggctggcggataagttcgatgaaacaggcgcggcggcaaagaaagcagccgctggcgtcgatagctttaacgacgaagcaaagcagacagaagaggcagctggtgacgctgccgtggggctgtaccggcagaaccaggagttccagaagttactggatcgcatcaaccctactcgcgtaggactgcgggacctggctgagcagcaggcagcactggcgaaggggcaggctggcggttttatctccgccaaagaggccgagcaatacaaccagatgctgaaagcgcgcgaggatctgctgaaaaggaatgaatcagcgctcaaagggtacgggtcggcagccaaggacacaaaaaccctacaggacggcctgaccatcagcacagggcagtacaatgccgcgatgggcatgctaccggcgcagatgactgacgtgttcacgcagttagctggcgggcagaatcccttcctgatcctgatccagcagggggggcagattaaagatagcttcggcggcgttgataacgtgctgacgatgctaaaagacactgtcattgattccgcgatgtcccttggtgagctgaaatcagcgttcgctgacgttcgggacatgtctgacgcggccttattgcgatttggccgggctgtaaccgtcttgggcgctggcctgctgacagtcatcgccgggctgggatatgcggcctacaccagcagcgaccagaccgaccgcctcacctcatccctcatcctcatgggcggtgctgggttcacttcggcgaagcagctgaacgaagcggcggaagccatcgcgaataagaccggcagcagcatcagcgaaaccattgacacactgatcgagctaaacaacaaaggcaacgccactgccgagcagatgacccgcatcgccaccgctacccagaagatgtccgacgccggtctggatgctggcgacagcatgaagcagttcgactcgatcatcaaagacccggtgaagggtctggcgaagctgaacgagcaatatggcttcattgatgagaaggaaatgaagcgcttaatcaccctgcaaaaaacgaagggcgatcaggcggcagtcaccgaggcaatcaacatctacgctaacgcgatggagaagcgcagtgatgacgtcgtggatgcaacggacaacatcgggcaggcgtggaactcccttaaatcaggggcttccaacgtgttccgggatatcgggatcacgctgcgggcatggggaaatcaagccatcgacatcgtcagccttgtgaagctgtcgtttcaggatttgatcaataacctggagtcacttgattctaagttcaccgtcggcgtgtctaacatgctgagcaagatccccggagtggacgggaaaggcgtcctgtcggctatcgggatcgacgtcgatgaggtggagaagcgcgggaacgagtctatcgccaaaggcaagaagatcgccgaagagttcgcgaagattaagaacaaggtgactgcgcctaacgcgcaatacatctatgaacaggaagttcgcgaaggtggcggcgttgccgggtctggcggaacagaccagaagtcacgcaatgcggtcagcaagctggcgagtgagtcagcgaagcacaacaaggagaaggccatcaccgttgcgcatggtgatcgcatccttgagcagtatcaggcgcaggagctggcattacaggcgcagatcaagacgctgaaagaccgtaacgccttcgacgtcaacgcctccgagcagatgaagaactatcagctgttagtcgcgaagatctccatccttgagggtatccgggccgacgcaaaaggccgggcgctaaccaaggacgaacagtcgcttctggcgagcaaagaggaaatccttgcaaaagccaagaccgtcggactgctgggcgatcaggtcaagcagcttgaacgtcaggcgcagatcaccgatgagctgacccgcagcggcaatgacctgtctgttcaggtggcggccattaacgcctcatggggtctatcagccgatgaggctgcgcggctgctggagaacatgcagcgagcggcggccctccgggacaaaggcgcgactcaggagcaaatcgacgaggacgcacgccagcgtgaagcgctgcggcaggctaccgacgcgaaaacgcaggactgggcaggcggcgcacgctccgcgatcgaagcgtggggtaaggatgccaccaacacctcagccaacgtacagaaggccatcactggcgcaatggatgccgggctggactcgatcaactccttcgtgatgaccggtaaggcgtcgttcgccgactttaccaaatccatcctcgggatgatggttcagatgatcaacaaatggctcatgttcaaagccatccaggggatcggcggcgcgatgggcttcgatatgtccagcatcggattcaatgcgaagggtggcgtatacgatagcccgtctctgtctgcttacagcaaccgcgtctacaccacgccgcagctgttcacgtatgacaagccgaagccgtttgcgaagggcggggtgttcgccgaagccgggccggaagccatcatgccactggcgaaggattccagcgggcgtcttggtgttcgtgctcagggcggtgccggtggcggcgtctccatcgggtcgatggaagtgaatgtcgaccagaacgggcaggcgacggccaacgtgtcagagtctggcaagctgggccgagcctacggtgatgcaatggccgcagccattcaggacggcatcgcccgtgcaagctcaccgggtggacagatctggatgcttattaacggtcacgcgtgataacctacagcctcccacacaggaggcttttttttatggctacattagacgcgtggatctggccgctggcggcaggtcaacaggtatcagtgaaagaccgcagccgatcgaacagcttcggcgacggctcacagcagaacgttttagaaggcatcaatccgttcattatggaggtgccctgctcgtggactggcaacgccaagaccggcaaccagatcctatccttcctgaaagcgcacatcaccaacccgttccagatggttccgccgcatggcgaactgggcctttacaccgtgaaatcaggcacgatcaaatatgtcgcgctgggacgtgcaaccatgaacattaccttcacagctgagcaggccgtgggcatctacacaggggtgaaaggatgagcaacaccattttcgacgaagccacaaagctcgacccgtctggcaagatcatcctcatggagatcgacggaaccgagttcggcgcggggatcatccggggccactattgccaactcccgcacacgagcaaggagatcctcgacagcgcgaacagcacactgacccgtgatcagcttttcaactgcaaaagcgccaatactcgcggcaccgtcacgaagaacgaagaccggaacaccatcaactttaagtcgctgggcgtcgactcgaacctggttttacctgagttctctggcggcctgactggtggcaagtatcaggtgatcgaggtggttggtcgctgggtgactccgcctccatcaactgacaaccagtatcagatctactacaaaaccgcagcgcatgatttttccaacagctacaacaagggcggggcgttggcatcagtaacgaaggatcttggtgatggatggctgaaattctcgttcgatatgtcgaagctgagcgctggcggttcagactgggtaaacagccagattatcggcatccgcattgacctgtggcagcaggcagtcggcgagatcgagatcaagcgaatcagcatcctgaataagaacccgcacgaggttgacgcgtccaagctggcaccgaagtcaatctggttcgacaacgtcgaatatggctattggccgtttatggctgaggggatcgagttcagcagcgagcagcaggggacgcctaccctgtccattggcaaccagtcgggggtcgtcagcgcctacctgcgcgcctatcagcagatggtcggggcaaaggtcaagatcatccagacctacgcgaagttcctcgatccgcgcaacttcacagatggtaacgagttcgccgactcaatgcagcagtggacgcagctttactacatcgatcggccagactatgagggcgaagagtatgttcggttcgcgctgtcgtcgccgctcgacctacagaactttcaggtgccaacgcggcagatcacgacgttctgtcagtggcaggcgcgcggtctttacggcaaaggcctggacgccggggaagaaaacgggtgcagctggaaccgtggcacagctaaaaagtggtacgacaagcacgggaaccaggtggacgacatcacgaaggatgagtgcggcgggtgcattcaggattgccgcctacgcttcggccagctggtgagtgacccaaaagcggccgttctggactacggcggttttatctctgtgcgcctgattgattaaacgcactgtatcgcgttctgcggcgttttcttgcgtaagacgtccgaacgtatggcctgacggcgttaaacgcgacagcgtgccgttcaggcccgcagttttcgactaccgaagataagaatacatcccatagccatatataataaaaaccctcccaagggagttttatttatatggtcttgggtatgtcttatatgtatttatggtaataaatatatatacccataccacctaacacctgaaattcagcattgtaaatcaatggtttaaaatttcaggtggtgccaagtggaggcaaaaatgattgacgtaaacgacatcccggtacagcaattaacctatattaaacaacaccttacagagtgttcgccgcaagagggctgcgggctgctggtgaattcaggcggaggcctcgaatactggcctgtcatcaactcagcagccgacaaaatgaacagttttcgcattgcaccgcaggaattcgctgaggctgaggacgcaggcaatatcgttgccgtcatccattcacaccctggcgctgacggtctggcgtatccgtcaatcctcgatcgccagctcatgcaggaaacttgcttaccgtggttcatctacgccccggacaaggatgagatggcggtgttctttgaggagccgaaggggctgctgggtcgtgacttcgtgctgggtgcgacagactgctacggcctggtgatggcgtggcaccgttcgcgaggcattcagcttcctgacttccgcaagccttacccgtggtgggagaagggtgaggagcttttcacggatgagaacttttcagcagcgggatttatcaagaaggccgaggcagagccgggcgacatggtggtgttccgtatcgcgtccagcgtaagcaatcactgcgggatctacaccggcgacgggatgattatgcaccacctaatgaaccgcaaatcgaccattgataggatgtatggcacctaccttgagccgcgcattactggtattctccgacatgagttactaccggagatcacaccatgggaaaccagctaagcaccatccgactgtacggcgaaatgggggcgcgcttcgggcgcgtccatcacctcgcggtcgactcctgcgccgaagcgatcagcgccctttccgccatcctccccggattcgatcaatatatgcgtgacagccagtcgcgcggcctgaccttcgctccgttcatcggaaagcggaacatcggcttcaatgagatgtcgcagccaatccctgacggcgaagagttccgcattgccccgatcatcatcggcaacaagaagggcggcctgttccagaccatcctgggcgctgcgatgattgttgcgggcgtcgtggcgtcgttcatccccggcgggcaggctgtctccccttacctcgttgctgctggtatctccacggctgctggcggggtcatgcagatgctgtccccccaggcgacaggcatgaagatccgggaggatgacgccaacgcgccgtcatacgccttcggccagccggttaacacgacagcacaaggtaacatcgttggcgttttgtatggcgagcgtgagatcgggggtgctatcatcagcgccggaattatcgctaacgaggtacgttcttaatggaaatcaaaggatacaagggcgggagtagcaacgtgcatacccccgttgaagatccagactccctgatcagcaacgcaacggtaaggatgctcctggcgttgtcagagggtgaaaccgtgccgattagcgcggaagacctgcccaagcgcgtctatctggacgggacgcccgttcagaacggtgacgggtcagtaaacattccgggcgttactctggaatatcgcaacggcaccccgcagcaggagccgatcaacggcttcccggcggtggaaagtgaaacacgaatcaatgtggagctgaaaaagtcttctgcatgggtgcgtaacatcaccaacaccgagatcgacgccgtccgcatccgaatgaatttccggctggtcatccagcagaaggacggggatcgcgtaggcggacgcattgagtaccggattgaataccgcaaagtcggcgacagcgcctacaccgtggccttcaatggtgctgtcgacggcaagcagaaagacaactatgaacgcgatcaccgcattgacctgccgaagagcagcactggctggcaaatccgcgttacccgcctaactgacgacagcacgtcggataccaccgtgctcaactccgggatcgtggctgtcaccgagatcgtcgacgcccgcgttcgttacccgtggacgtccctactgttcgtcagcttcgacgccaaatcgttccagaacatcccgacaatcagcatcaagatgggcggccgtctggtgctggttccgtccaactatgaccctgttaaccacacctacagcgggtcgtggaacgggacatttaaacaggcgtggacggataacccggcgtggatcgtctacgacatcattctgcacaagcgcttcggtattggccgccgtatcccgtcctcattcctgaacaaatggacgatgtacagcatcgcacagcgctgcgatgagctggtgacgaacgccgacggcacgcagaaccgccgttacacctgtaacgtgtatatccagaaacgcgagcatgcgtggatcgtcatccgtgacctggcgtcgatctttaacggaatggtcagctacagcaatatgcaattgcagttcgcgcaggatgcaccggcagaagtccgccatgttgtgacaaacgacgacgtcgtgaacgggacgttcgaatattcctacggcagcatggctaaccgtcgcgggatcgcgatggtcacttttgacgacccgaaggcgcactataagacgcagaccactgtggcgcagatcaaagacctcgtggagcgctatggcgttgagccgctggaagtgtccggcatcggctgcacggacgaatacgaagcgcaacgtcgcggcctgtgggcgctgctgtcgaataccaacgacatgcagatcagctaccgcgtcggcctgagcggcatcaagtacctgatcggcgacgtcgtcggcatcgctaaccgctacgtgcagggcggtcagttcggcgggcgtgttgctggcgcatccggcaccaccattacctccgaccgtatgatctccgaccacgtggcaatcggcgacagagtgatcgttcgtcaagctggatcggatggaacctacaaccgcgtgatcaatgcaatcgcggctgaccggatgtccttcaccgtcgacggcactaaccttgatattcagagcggtgaagtgttcctgctggatactaaggtgctggcaccggaactaatccgcatcaccaagatcacctacaacgagcaggacaataatttcaccgttaccggtctgcaatacagccactcgaagtatttgcaggttgacaccggcgcgcgaattgaagaccgcccgacatcgctgatcccgaccgggcaggtacaggcacccgctaacgtggtggccgaaggctacagtatcgttaaccaggggattcgctcagctaacgtaaactgttcatggttcaccgtagatcaggccgtcagctacgacattcaggtgcgccgaacctctcagtcaaacggtcagtggtcacagggttggactaaccttaccagccagtcgagtacgtccgttgacctgacaaacgttctgaccggcacctatcagttccgcgttcgttccgtatcccgtgacggcgggtcgtctcagtggatcgagtcgaatcaggtgttcgttgacggcaagcgcggcagcatcccggcagtagctggcctgaacggcttaggcatcgttaacggcatcacatggcgttgggtgactggcacagatgatctgatcgatatgaagtcgacagagctacagttccagcgcattgacggcaatggtgctccggttggtgggtggatcgatctcagcgtcgtgacctacccgacagggacattcacacagtcaggcctgaaatttgccgaacgcgtgcaggtgcgcgcccgctttgtgtcgtcatatagcgatgctggcgagtggagcgccccggtcatggcgatgacgtccgacaacatggacgactattaccagaacatcgacgacgcgatcaaaggctccgacacctacggcgaacttaccagcggcatcaaagacgtaagcgacagcgcacaggcagcgaaagacgccgcgcaggccgcgaaggttactgctgacggagcagtgacaaccaaccagcagcagcagcagcagctgaacaaccagctggccgagatccagaagaacgcgcaggacatcaccaacaccgctaacgcgggggcggcaaacgccagcgcaatcgctcaggagatccttgaccgcaaggctggcgacatcgcgaacgccaacaaggcagctcaggacgtggccgacgctatcgcgaaggctgagacggatgacgcagaagtggcagcccaggctgcggctaacctgctggcgacaaaaaacgaagtcgaagcgcagatcagcaccaccaataccacgatgcaggacggcttcgacagtctggctcagcagatggcatccatttccgctggcaccggcgagcagttcgacagcctcgctatctggtatttcgacaacggcccggaagggtgggcttctgacgacgccaacaccaatctgctcccagtagaccaagatggctggatttacccagctggcgcagcagccaccatgcgctcaccaaaccagctggcaatcgacgcgcgcagctataagtacatgcgcctgcgcatgaagcgagtcgggaacccgtcatggtctggcaggctgtattggataggcgtggatgagactggctggacaagtggccgctcaattgccatcccggcacctgactttgaccctgccaccgggatcactgtcctgtcgatccccgatcttctgtgggcgacatccggcaccgtgcgccgcctgcgctttgacttctcaaacaatcaggacgccaataactactacgcgatcgactggatggcagtcggccgaccgaccccgggcgcgtcacaggcacaggttcaggatcttcgcaccgccatgacctctgcggactctgccgaagccgcagcgcgtaacacgctggccgtacagcttcgcgggaactatgagggaaccgacccttcaaagctggtgactggcatcatcttcaacgagcgccagacacgagtcaccgcagagcaggcgatcgccagcgacgtcaacaccctgcgcactgactacaacgcgaacaaggccgccgtgacccagcgtctcaacacgctgaccagcgaaaaccagtcgcaggcgcaggcgcttacccagcttcaaagcggtctgaccgacgcgaacggaaagatcggcgctaacgctacagccatcagccagctcaagacggacgtgaccgcgctggatggtcgagtatcggcaaatagcggtctgatcactaacctgcgcagtgacctgaataacatgcgcgtcggcggcaccaacctgatccctaactctggcacgctggcaggcgtcagcggcgttgtgcagggtcaaacgtacaaaggcaatgctatccgtcgcatcgcgattgcagcagcctcagctggctcctacgaccaatttgagtatgagcttgcggctccgatcgacggaaccgaagtagtcgtcagcttctacgcgaaagcgaacaacgccgacagcaagcaaattttcgtatacctgaacaacccgaatgccacgcttacggctttaagcagtcagggtaaaactggcagctgggctactggtggcgatggttcgatgacaatcgaccttacggaagactgggcgcgctactgggtgaaatacacccgtaagagcggccagacgggaacccagcgcgttatttttggccgactgctgaaagggtctaaggacaaagaggtttacattagctcgcccaaattcgaatacggcaccatgcctaccgagtggagcgaagcaccggctgacaatgccagcgcaagcgcgttgcaggcactgaccacccgcgtcactgcggcagaaggcaccatcagcaccaatagccagtcgatcactcagctcaaaggcgacgtgagcaccttgcatggccagatggctaacaaggcagaggcgagcgcgttgcagcagctggctaccactgtcacccagcaggggaacaccatctcatcgcagggtcaggcgatcaccgacttgcagaacaccgcacagaacgggaaagctaagtactggctgaccaagatcttcgaaatcaaggtgagcggtgtcgggtacaccccgaaactgtcagacctgtctggcgttcctccgctgtccgtgtccgagatggccgacgctgcaaggctggacttccttgcttacggcgactacaaaatcgcgtatgcgaaggcgctggtgtatgtcgccgctgataagaccattgctatcgctcccggatcccgcatcgtggacgacaccgcgcgcctgtacatcaacggggcagaggtggctaccttcggcgctggaaccatcacctacagcctggcgctcaaaaagggctggaacacgctggaatttgtggttgcgcagatcaccggccagttcttcataaacttcggcctcaagctgtcagacaacgtcgatcagctgttcagtggtgccggtcagctggccgctgcatcagcctcgcagatcctctcctctcaggttgagcagacctccaggaaggttgacgcgaacagcgccgcgatcgtcactctgaacaactcggtgcgggacatcaacaccgcgctgaacaacaaagctgacgcgaacgcgttgcagtcgctgaccacccgtgtcaccaccgccgaagggaagatcacggcgcagggcaacgcaattacccagctcaccagcgacctgtcgacagcgaacgggaagatctccgctaactcaacggcgatcaataacctgacgacccgggtcagcgcagccgaagggaagattgactcacaggctgagtccatcacctcgatcaactcatcgatcaaaggcgtactgacccaagcggccaaccttatcccgaacccgacggtagacccggcctatccgcaaatgggcatgaccgttgtttccacaacgtcagaaggcgttccggctggatgcccttacccgtgggcgattaaatgccagtaccgcgatcacatcccgggcatgaacaacatcccttgccatgaggggcaggtgttcgagatctctgtactggcagcatgcggcaccggctccgcaccattccagcactacatcgggacgtcaacgcaggcagatggcagtatcgggtcgccgcaggcgaacggaggccaaatctcagcggctaccggcgcacagtggacgcgcactacgtggcgctggacagtaaacgcggcgcagggggcgaagggttacttccgcccgttcctgcaaatcaaccagtccggcccgaacttcgggacagtctggtatgcaactgactggagcgttcgcgacgtcaccgcagcggcgaaggcagaaggcaaggctgacgccaacgccacagcgatcagccagctgaccacccgtgtcacatcagcggaagggtcgatcacgtctcagggacaggccattaccaaactgaccagcgatctgagcacgcttaccggcattgtgaacaccaaggccgacgcttcggcgctgaacgccctgactacccgcgtgtctaccgccgaaggaaagatcgattcacaggggcagtcgatcacccaactgagcaatagcctgtcagcaactgacgcctcaatcgacgcgcagggcaagatccccggaaacctgctgtctaactcatcgtttgagcgcggcccggttaacttcaccggctggagcagccttgccaccatcatcacggcaacacagccgcattctggcaccaaaattgtcaagatggcggcaggcggaagggctggcataggtcaagccgtggagatcacgcaggggcgtcgctaccgcttcggcgtgtttgccaaacaggacgccggtactgtcatcaacgatacgaataacacgaaattccgtatcgctgacgcatcaggcaatcttcttgctgtcacgaattacggcccgtttacgtctgaatggcaacacgtcttcatggactggacggccacgaagactaccatcgcgctgtttcagctgactaccgcactgagtgctggggcgatgtatttcgacgacgtctacgttgtcgacatcaccaacgacaccaagattcaggcgaacgctgacgcgataacctcgctgaacacgaaagtgacccagcagggtaacgacatcacgtcgcagggcagcgcgatcaccaagctgaacaactcgcttaaaactgtgcagtacagcaacagcaatccgtgggtagatggatcattcgagtcgtatgacaaccagcaagccatcggtggatctaatgccatggtcactactgacttctcattcagtggtcagaagtcgcttatgtgtcgccgcgccaacggtgaatccggcaactctgacaagactttcggcaatgaaacagccattcgcgagtctgcggtttaccgcttcgaatgctgggcgatgatgccggaagatgagacgccgccgaacgggtggaactgtgttgtgggcttaatggttagcaactcagccaaccagaacgcatggcctagcgcattcgtcatcacagaggcagggcttgctgctggtggcggccgcggtaagtgggtcaagttctccggtaagctcggcttagacggcgcaaagaaaacacgaggtcgcctgtggatctccactcgcggcacatcaggcggggctggctatcgcatctatatcgacgatctggtgatcaccgacgttacagacgctcacgcagcacagaccaccgcagatgctaacgccagcgcgatcaacagcctgaccagccgcgtgagcaccgcagaagggcagatcacatctcaggcagacgcgatcaccaagctgaacggtgacgttagcaccatcaacggcacgctgagccagaaggctgatgccagcgcagtcaccgcactgcaaacgcgcgtgaccaccgcagaaggccaaatcgcgagcaatggaacggccatcaccaacctgaataacggtctggaagcacagcgccgcaccggtgaaaacctcgttcagaactatgacttcatgcaaggcgacaccgcattcagcgtgcagcgggatagtttcagcacagtaacgttcggcgactacggagatggcaaaccaggcgtgcgcatggtgaaagtcaacgccacatcgcccggcctgttcgcgaacaacaaaaagccggtgccgcagaacggccagcgccgctatcgctatgttgtgcgcgcgaagggtgtaagcggggctatgaaccttcttatgcgtcgctggaatttcaacggctccgtagaaggctcttataccgacaagaacaacacgctgacaactgactggcagaccctgacatgggaaaccgatctcaccccagcaagcggatttgacggttcagcgttcagcctgtattgccacccgtctaacgcggaagtgtggatcgactcgttcaaggtgtacgacatcaccgaagagctgacgatcaaggccaacagcgcggcgatcaacagcctgaccaccaccgttacccagcagggccaggacatcaccgcgcagtcgaacgcgctcacgcagctgaaatccagcctgactaatgacgcggtagcgctggcgacaaacccaagcaacatggtcgcaaactctggctttgagcgtggaaccgataactggagtggttttaacgcttacgcggatatctacgcggctcaatcgccacgaacaggcgcatatattatgcgcgggctttctggcggtatcgtggccgtgtctcaggtaatcctggggatcaagaaaggccgcacctaccgttacggcggatacatgcgccgcgattcaaacacgactatcggaaaccaaggcaataacaagttcaggatcggcaatgccgacactggagctggccttattcatcaggtcgaatactcgcaaagtaacgtagggacaagctggactcttattactagcgattgggtgccagcaagcgatcaaaacatcactttcagcattaacgtacttttgactgccggtaacttctactttgacgacattttctttgtggacgtcaccgacgagatcaataacgcggccaatgctacagccatcagcaacttgaccacccgagttactacggcagaaggcaaaatcacgtcgcagggcagcgcgatcacccagctgaccgcagacctgagcaccgcgaacgggaagatcacggcgaacgccaacgcgatcaccagcctgcaatcgactgtcacccagcatggcaatacgctgacctctcaggggcaggcgattaccaagctgaatagcgacctgtccaacctgtctggcgtggtggacacgaaggccagcgcttcggcactgaattcactgactacccgcgtcacgacggcagagggcaagatcaccgccaacaccacggcgctgaacagcctgacttctcgtgtcggtgatgcagagtcggcgatcgacggcctgaatgagacgacagcggctaacggtctggcgatggcgaacggcttccagcaactgcgtgcgcagatcggcgacaaccaggcggccatcacgcagacgagccaggcaatggtggatcttgagtcttcaacggctcagcagatcggcacaatcaaggcgtcagtggatggtatgagttccaccgttcagcagacttcaacggctgttgcggatatcaacggcaagttgtcggcgcagtggggcgtcaaagttcagactgacaacggcggcggaaacccgcgcatagctggcattcagctgggcatcgacgcgagcggttcatctcagttcctggttcaggctgacaccttcgcggtgtacgctggcggcaataacaagacgttcccgttcgtggtgcagaacggcgtggcgtacatgcaggaagcgctgatccgcgacggttcgatcactaacgcgaagatcggtaacgaaatcaggtcgaacaactttgtcgatggctctcagggctggcgcatcgctaaagatggcagctcgcagttcaataacgtgatcgttcgcggcagggttgaggcgaatagcggtattttcaagggaacggtacaagctgaatcttttatcggcgatattgctacttctgcatcgttcaacggatttactgtcaagggcggtgaaggttctggcactatgaacgcatggtatcagaaccgtgggtatccgatgaccatcacgctgaactgcactgtgcgatgcaattcatactctggcggcgtaggcgaccaaagccgtgacttctatgtggttctgacattcaacattaacggagtgcagagtacgagacgcgtcgttgttgatatgcgggataaagcgcgtggccttgtggatgttccgcagtcgttcaccgttaacattccagcaagtaacgaccgaatcggcatctcgctgactggcgcaagttttgggccgcagcagagtgaggtcacagtaagcaatattgttgtgactgcattccgaagcaacaacggttcttttggacaataaggagcggcccttcggggccgatattaaatggcaaatattagcgaccaactcgcggctgatattcacaacgcattcagcaaatactacacagacctcgccaatcaggatcagatcttctttggcgttggtgacgtgcagatcaccaagcaggacggaaccaccgcaacagtgcgctcatggaacaaggtgatcggctcagtggataccgcagctcaacgcggagctgcaaacaccttcacggccctgcaaacgttcagcgccgggattaatgtttctgtcggcaacatcaacgtgatgaacgacaacagcatggttatccttgggaaaaacagcgatcttgcactgcttaaaaagagcggtcagggcggcaccatcgccgtcggcagcggcacgccattcaggatccagcgcacgaatacagcaactgtctcaccggcttctacggtcgaggatattttgaccatcggcacggataagaaaaccacgcttgccggagcgcttaacactggcggcgatgtagtagcgaatgggtttctgtatgccaaatcgattgagctgtcatttggcacgccatacatcgactttcatttcaacggtagtaccgccgattacacaacgcggcttatcgagagcgtagccggtgagctgactctcgagggggcctttatgtgtaaaaaacacctttatgcgtggggtgcgatgatggccaggtcggtggcaccagacaacgtcccggttgggcaacttcttaccggcgcgccgttccagtcgatgattcagggtcgtggggcaaacggcgatgcgcgcggcgcggtggctaactactacattgaggagctggttggaaccgaacataggattgtcgcttacctcgacggctacgggagaaccgacgcatggatcttccgggctggcggcacgctaaccacgccaaagggtgacgtcctgaccactggttccgacgtgcgcctgaaaacagacttcacacaagcgcctgagaacgcctgtgagcgcatcgaacgattaggggtatgtcagtaccgtatgaagggagaaagccgcgtaaggcgtggttttatcgcgcagcaggctgatactgtcgacaaggtctatacctatcaggacgttgagcaggagatcgacggcgagcgtatcaaggtgatgaacgtggactatgtggcgatcatcgctgacctggtggcttcggtgcaggagcttcggcaggagttgaaggagctgaaaggggaataaaaaaggggccatcggcccctttctttacagcacgtgataaagaacgttaatcacgaagcccaacacgaggccgatcgctgctgccagtaatggctgtttcattttgtcaaacacgttattcaccctccactttaacgagttcatgccattcgattccaaggggcttcgcaaggcggatcatggtttcaatggtcgggaactcacggccattgtcataacggcatacgcggcactgcgcaatgcctgctgctttcgccagaccacgctgggaaaatccagcgcgctcacggtgttctttcaaaatcagtgtgatgttcattttctacctcagaacgggatatcgtcatcaaagtccatcggcggctcgctggactgctgctgtggttttgactgctggcgcgctgggccggaatgtgtcttcggctgtccctgcggctgcccctgctgtccgccttcgctcttgccgcctaacatttgcataacggcgttaggcccgttcagaaccacttctgtcgtccatttctcgactccgttgctgtcagtccattttcgtgtttgcagctttccttcgacgtagatctgagaaccctttttcacgtactcgccgacgatctcagccagcttcccgaagacgacgacacggtgccattccgtttgctcctttacttctccggtctgcttatcgcgccatgattctgacgtcgcgatcgtgaggttagccaccgcgccgcctgacggcatgtagcgaatttctggatcctgaccgatgcgacccacgaggatcaccttgttaactccacggcttgccatttataacgctccttaaaaatcttcttcgacgtctgattgctgcggcggtacatcttgcggctgaacgtcatcaggtgcaacctggacggtagccttaccgcgtttagcgttggctggcttgccgggattgaacgggcgggcttccgcgtttttaagctcgacgatcttgctggcgcgggcgtcttcaacgatgcgcagtgatgccttgtcgctgcggaacagctcgcacgcggcgcggtagattgcatccacctcatccttgtccttcgcggcttcaatggagcggcggcagtcggctgcgctacgcactgatttgttgccgtcgtcgtcgtccatggtgaggccgaagatcgaaacgcgggcatagcggcgggcgtaggtaagcgttgagccgaagccctgggcgtcgttcttcgccagcgggatctggcagatatcggacagccattcgcctgtggcaacgtggatgatgcgcgtctccatcagcatcacgttcggagcctgtccggcctcgtgcgtcggagactggatcatgatcaacccggcatcttccattgccgggccgatggcggccgcaacgtctccgagggtcgcatagtggtttttcaggtgctggttctgcttggatttcttcggcgatacgcacatatcctgcgcgtgggcaaactgcttaacgatggtgctgcatggctgggagaatttcatcatttggtcactccttatattgagtgggtaatatgtcagtatattaccccggaatcaattattttttggttttcacatcttcccacaagtggcggaaggcgttttccaggtagtacggaggatcgaggtcaatcacgcttccgccgccgtaggtcggccacgtgtcattgtcccggcaccatttaaatgtggcgatggcttcacgcagctgcgcatatccaatcatcagagttttgtttgacaaggcgaaaggagcgacgacgaacgggctgctcttctcctgcgccaacaacatcgtccttctcggtttctggccgaaagccgccttaaacccctcgcgctgcaacgccattttcagcggatacccgagatcgaagcacttacgcatgaatctttcagggttggccgtgtccgtggtcttatagtccaccatgtcggcgaacttgctgatccagtcgaggcgcaccttgcagcgcaaaccctgatagctgaaaaagatcgagacttccgacattccgtcaacgaaatactctttaaacgagtcgttattaaacagaacggcgcgcatctcctgaatgatgtcataatcctgtccgcgaattccttcacgatctcctcgctcttcattggccttcttgactatatcgtgccaaaagacgacgtcgtttattccaagagctgcggcggtattggtgactgtctcaattaattccggctctttcattttcgaataaccggcaacaccgtgttctttcagaaatgccttcgcggcctcaagcgaggtaataaagttcggctgcggaataatatcgcctttatcgtcacgcttaataaagtcctctttctcaggcatgcggaaatattcacgggcgaataattccggctcaaggtgattagcgtgggccgctgtaccgaagaccagcgcgcgggattgcttcttcttgtcttcggcaaatttccagttggccgggcagcttgagaacagctcccacaagcctgagccgttcatgtggtctgtctcagcgtgatagtcttcgttcgacaggtcgttatttgtgaagaacagaacttcatcatcttttagcgatttaatatctgacattacatgatccccttattcatatctaaccgaagttttcgttcgatatcttcctgcctgacaaagcggcgtgaatcgccattgcaattaactttcaatagccatttgcttttattctcaatagccggatacttcacggcaggatcgcggaatagaatctgaccaagcatcaactcggttccagtgggtacgccacaaaataaaacctcccatagcacgtccctgataagattatttcccggcgctctatatgtgagaaccactttctttaatgatcgcataaggccgtaagcctctttgaatgttttgcggtcagtgttgcgaattccgccgtgcaatattctgtgtaactctgcatgtgtcatgatgacctcctgtgtggtgtttgggcatattacttccgcataataggccatgtcaaggctatttaactatgatggtcgacggcccgaggaagtcgatcaccgccagcttcgcgcagtggaagccataagccaccgcagcgaatccgccctgagcggatacggcggacaggcattcaacctgctccttgctgactggcgtcgacagcttcttgttctcccgcttcatctcgatcaccccgaacggctccccgttgcggccacgatgcaggatcacgatgtcagcgacacccttgcgcagtcccttcgcctgctggcgcagaaaatactgcttcccggccttaccgccgttctcgttcggcacgtggaaccagtacacgtctggataccaatggttaaaccaggtggtgaagttaatcaggtggtcatcctcaagcgccttcgtcggttcgtctggtggatacagatattctttaatcacaggtcttcccctccttcgaaaattttacgggctatcacgtcgcgtgacttgctcccgcctatccgccggtgcgtcacacgcttcggcgctgcaatcaggtgagcggaaggcaggatctttgttttcactcccttccgcatcttgccccgggtgttcggtgatgcaacatgcttatcaagcgcggccttccattgctgttttgctggcatgctgtcgctgtccggccaaaagacctcataggccacaaagtcaggatccccctcattccccagcacgtagcggaacaccacgccgtttccgcatttcgtcggctcaacattaaaggatcgcacgtccacaaagtcatcccgggtatagctctttttctcaaggctcctgtttgggtcgatcaacgtgttcccgcagcgggcgcactgccgggcggtgatgtcgttctccgctccgcatccgcgactgacaaccacgccgcgatcgttcttaaagtcatcgcatgtgcgcgagatgaaccagtggtgacagcggtcgtccttgcggtatggcgtgccgtcttcctcgatcccgtcgtggtcgtacacatggcggcaccggcgcgcgtgcttgccgttcgtgtgtccatatgggcattccttcgtctggccggtgctggtatccgtctcatagcggtactgctcaaggaatggcgagaagtacagctccgccaggtcgtccagcgctccaccgtagtcgagaacaaggttgtcctctttgaccatccccagctcttctatatggaattttttgaggatgcgcatccctcgaccgatgagctgaaccagcagagtgaggctgccgatcttgcgcaggataacgatcgtgtcccacggtggaacgttgtatccggtagtgaggcacccgatctgaaagataaatttgcagcggttgttaaatgcgtcttccagtatccgatcgcgctccttctgtggcgtgtcgtcggtgatgatcccgtaagtcactccgggcggtaacgcgctggccgcctccttacagtgcttcttaccggcgcaggtaacgagtacgcagttacggttggcggtacgcttcacgacgtcgagcatgatgttttgcgtgatggttccctgggacaggatctgcttctccatctcgatcaggtcggcatcactgaattcgtcgtcaccctcttcgccgcgactcacgaaggaatcaagctgataggtcagctcatcatcgatcgcaccgtaatgggtaggcaccaccgcgccaacttcaaccaggtactcggtggaaatgtcacacaccgcacgccgccagaatccgggggtgtccctgtcttcgttgatgatcggctgtgtgcctcggtagtcggtgccggtgtacccgataacaaccagatcccgaccgtacatctcccggcaacggcgctgcatctcccggatgataagcgtgtacccggtgcggccagcggcgatcatctgcgccagcgtgcgctctgcgttgcgctgcaacctctcgttgtcggggtgcttatcagccagctcgcaagtcatctcgctttcaacgatgtcgtctacgttgacgtgctggcattcgtcgatcagcaggaagcgcggcacgaagttagccagctgcttttcaagggcgttgaccaccgtcttctcgctgccgcaaatgatagggaaggtcgtggatttcatgcgcaggccagcgctgaacacgctgttctccaccccgaagttccgtatctccatggcgttctgcttgatgatcccgccctgacgtgacaacacgagcgcgggcttgttgagctgggtcaggcggcgggccaccaggctgatcagcgtggtcttccctgccgacacggcggccttgacgacgaacgggccgatctccttgtagttgttgatggcctgcgacgtcgcaaagtgtgccgcgaactggaacggatacgggtcgtatggcatgccgcgaaggcctctaagcagctggctgcgaaccgcctctatgtccgtctcctcaatcatttgcttgatgcttttcaccttttccattgttgcctcgttgacgtggtaaacattgcaatatattctgcacaacgaataccaaaacacaaggaatttaaaatgatgaatattggcaaactacccgaaccagaaattcacgagggcgcgatacagcgggcttttgtgcgttctatgggcaactcattccagatcatgatcccgaactactacacccctgacaacctgggctatgaggcggatatgttctgtatccgcaagagccgctacacggtggaggtggaggtgaagatctccatctctgacatgaaggccgacttccgcaaggcccacacgatctacccaaagacagcggaggaagcagaaaaatactggcgatcagacgaaaacgagcgcgtcccgtacccggtgaagatgaagcatgactgcctgaaagctggggagctgatagccaaccgcttctacttcctggtgccgtggactatcgcggacaaggctcgggagatcctgccggactatgccgggctttacgtgtacaaccagctcggactggtacacgaggaaaagatgggtccgatgctgcacaagcgtaagctcgatccgaaatatgaccaggggatcatggccaacctcaacgcccgctacctgaatctgtggaggaggtcatgaagttctaccccattgagcagatagaacgactcatggtcgggcgctgggaggtgctgctatcccagtattgggataagcgcgcattcaacggcaggcatcaggcctgcccgctgtgcggagggaacgaccggttccgctggggtgagtcgaaacaggacgtcacgatgaagggtcgcggtgctgcaatttgcaaccagtgcggatcacacctgggcctgtggtggttcatgcaaactaccggctacgaattcccggtggcgctgcatgagattggggccaacttcctcaaggtcgagcctgaccaggaaatgacgaccgagccggtgatcgcccgcgacgcattcccgaaggctccgcgcgtcaggctggaagagaaaaacttatcagcctctcagaagtacatccgcaagcagcaggccgcgcctgactatgaccgccggttttggatggcctacgacctgatcgagacgatgcgcaaatatcacatgtgaaatacagttgacaggtatatggtgcctaagtaatatgcccgaacacccaacagaaggagcagaaaaatgtcagaacaaaccaccgtgtcaccgaagaccgccagcgcagtagcagaagaaatcaaaaaagctattggccgccgccgtatcccggtaattgtcgcagaccaaccggccatcgcgttcatgatcgccaaagaggccagcaaaacaggctacggcgaagatgagcagctgggagtgaacgccggattcaccgagaaggacgtggtgaaccagatcgctaacgccgcgctgttcagaaagtcatataaccgcgtccagcacgtcgtcgtcatcaagtcgagcaaggcggcagcggctggcaactttgatggccgctacttcgtgaagatcatgtgcaatcgcctgtatgtcaccatggggagcctggctaactatcttgcgggggcggaatagtgagcggggcaaagcccgtggtgattggctgccggaaaatgatcaaaggcagcgagcgctgaaagatggtctgctgtgggacatacttccacgctggcgggcgaagcagatgctggcacgtgatcgataatgtcgtggtgtgtaaacgttgtttcaaagagtggaaaaaggagcacaaagatgaagaaagcgatatttctgtttaaccgctcgcggcacatgttgcagccgtggttaaacgctggctatgagtgctggacgttcgacggtcagcttcctgacggtgttcacgaggttgagccgggattgatggcggttggcatgtggttcgacgcctcagctaccagcgtgcatgccaacgacgtagccagaatcgtaggtggtggcgtgaagttcatcgcctctttcgcggaatgcacatatctgaccactaccggcgcgcgctggctgtatcacccggaggatcgcgaacttccgattgctgagcgccgaccacacccggcatacccgaaccgccgccgggatatggaggacgctgtgaagctggcgaaattcgttgagctggtggaggcatattgccatatcgtcaacagtgattttgccaccgggcctatcccatggatgctggagaacccggcgcgatccttcctgcctaagctgtggcgcaacttcaatcacaccttcaacccgtgtgactatggcggctatatcccggatagtgaagagatgcacccggactaccctggggtcattcctgaccgtgacgcctataccaagctgaccgggatctggtgcagtgaagcgttcgtgatgcccgagccgaagccggttgagccagtaggcaaggatttcaaccgggcgataaaggtcggcggaaagagcatccgcaccaagaacatccgcagcgccactccgcgaggcttcgcgctggctgtattcgaggcaaaccaccatgaataaattcttcatgccgctggaagattacaaagttttcgcatcccgcgaagagacgagaatgatcaccgtcgagatgccggagatcggcccggccatcattagctgtgaagggaagccagatattctcgtgaccattcgcaaggttgcgccgctgtatctgaacgggaacacgtttcacattagccgcattgagtaccgcacattttcagttaaagggtgagaaatgaaagacgaagcagacaaagtgactatcgacgcgttcgaagcagaccacaacccggcgctgcacgcggaagccgcagcaaagggaattacgccgtggcagctgttcagcaatcgcgtatgggctacgaaggggctggtgactggcgggcactaccaggcagttcgcccacagaaagtgaccggccgccggttcaacgggagtaagacccctgataacgtccgcccgaactggcgcaccccggagcacatctttgcatggctggacatgacttacggcccattcgaggtagaccttgcggcctgcgagaagtcgacgaaatgcgacttctacttttgcaaggaagagaacagccttgcgcaagactggagccagtttgatgcgatgtttctgaacccgccttatgacgacatcacgccgtggacggagaagagccgcgagatcaagccgggcgcagtgctggcggtggtgctgccgaacgacaacagcacagtgtggttccgcaacatggtggatcaggcctacaccatcatcaacatcgtcagcaacggcaagaactctggccgcctgtcgttcgaacacgctggcaccgggaagccaggcaagcagaacaacaaaggcaccgtgctgttcattctgcgcgggcgtaagcgtcgcgccggtgtggagacgctctacatcgatcaggatcaaatgctgcgcgaactggggttactggatgcacagtaaggcgcaagtctggcaggccgcgaaggaatgcggcctcgacgaattcattaccgccgtttcaaaagcgtttcccggcgcgattgacggcgtggcgatatctgcgaaagggatcggtgttctggcgactgacgaccgcatgctgcgcaggctggtgagggttaaacatggcgtgacgctcacaaagcaacaggtcaaggagataaggacgaaatctggtgttactatgcgatataaaggggaaaattgaggagtagcaccgatgggtaagacgtacccgcggcacaatgcccgcactgtatcacgggctgacaggctgcgcaggatgaaccaagataagaacacgcgagtcatcaccaaatacatcgccgggacactagcccggctaccagaaggagaagatcatgacgttagcacaggcaatcttgaaggcatcaaccgaagggcgagatcttaaagtaggcaagggcgttgaccgcgagaacaagcacataggcccgcggaacggtaagttctggactgacgaacgcattcaggaagtgaccgacgacgtcaccgttcggcggatgacgaaggcacagatcatggagaagcacaacatcactgaaagcggtttttacaacgcctgctaccgttttgggatcccgacaacaaaatgaaaaaacataccgttattcatatcgacacggctgaatttcataatgccgtctacatccttggtcgtgaagagaagatctataactggaaccagaacgtcgagttccgcaagcgccttgttggcttactgggggagattgcagcagcgaagcacctgaacaacatttacggccgccaccggatcatcatcccgatgggagtcaacgcgcgcaccggcgtttcggttaatgcgttcggccagggtgacatcatgaccatctcacgcacagggacgcgcgaacggcaaacgcacgtctatgaggtgaaatcaaccgagggcatcggcaagcagttgccaaccatccggcaggacaacgctgaaagctacgtgatgaacggcgttgatgcaatcattctggtggcggtgcatatcaacaaggcgaaggcagagtgccggatcatgcagcaggtatcgcctgttgaagtgatcgagaagtggaggccgatggttaaccggtacggtcaggagtgttatgctttcaactaaatagactttgcgattatcatggcccccgttaacactcacgggggcttttcttttgggcgacttcttccacggcatcaccgacatctatcggatgtataagaccgacttagattaccccatcgctgcggccgtcatggctacattgcgtcacatccagctcggtcatgaaaggcgacagatctggactaatgcgatcatggcggcaatgttcgcgaagggtatcaccttcatcatcaccatcatcggggattccgttccacagatgcactggatcgcaaaccaggatgcaggctggatcgttgcctgcgtgcttgggtacgttgggatcgacaaggtcattcgcgtggttgagcggtatttcccgtccatgaatctcagggggaaaaatgatcggcaaccttaaaatttacctgctggcggcacttgccgcctttttgctatggcagggcggcagttatgcactgaccaggtacggcgaaagccgttatgaaagcggcgttacagctgggattaacaaggaggctgaacgcaggaacaaaattgaccgtgatctggccgaaatgcgccagagggagaaagaccaagatgatcgcgacacgactcgccggattgaccaagcacgcgctgacgctgctagtgctgcttatgctgctgacaggctgcgccagcaactcaactcagccactgccatcgcaaaacaacgcgcctccgctgtcggcgttagcagtgatgccggaacgctcgccgatctgctcgccgagctgttctatcagtcagtgcaagcgggtaacgaactggcagcagaagctgatcgatactacatcgccgggcagcgctgcaacgcccagtacaaccgactattgcaagcaaaaaggagtaacaaatgaggatgagtgacaacgggctgcaatttacagcagcatgggaggaattccgcagcgcgccttacttcgccaccgaagacgagcgccgtcgcgggatctacacctggggcttcgggcacactggccgcaaccctccacgcatcaacatcacgcgagaagccgcgctggcgatcctgcgtgaagacgtagcctatgctgagaagaaggtgaacgagtgggcacataagtccatcacgcaacccatcttcgacgcgctggttgatctggtcatcaatgccggtgaagagccaatcaagccggacaagaaggcgggagacttcgacgacctggtgacgcaaggtcgctgggatgagctgatcgtacagctggagttcttccgcaaacagaacgggaagatcatccctgggctggttcgccgggcactggcgcggcaggcgctggcgaaggggatgaactggcgggatgctgaggccgttggccggaacgcgaaggtgtaaaaaacagggggccatttggccccttgtttttagttcagaacaatgaaactcaacagcagatagccaggcgcgtattcgccaacgttggcgatgtgagtcacctcaaccctgatcacccttcctgtgtatccgccgatctccgtccactccctcaacatcagggtgtcgccctcagcgtaatcccggtcgaacttccttaactccgctcgttttttaccagaaacagccgcgttaaagtgaaccgggaggattttaagatcgtggatcacttcatccctcccacgacctcagcgccgatagccgcgtacccagcgaggtcttcgaacgagtcggtgttgtcgtcagtctgagcgcggcagatctttaaaatggattgtagcgtcaccacgtccaggccagtcagcggcatgttctggcggttcgcagacgaacgcacgatattgaatgcgtcagctacgcggtcgaactggcgctctttgccgttctccgcgccgtagcggcgaccgcgctcctcaaggtggccctttaccttctcaagaacctgggcggcgtcaagaggctcagaggagcttttatgggcatcggccttttcggcgaccatgtagatcgcggttccatccgtgcgagcacagtcgcggttcagtgtcgcgatgttgtcgagggtcagcgccgactcatcagctacaccgtggtggtggaagaagttggtcggaaattcgatcacgttagggactgagtattcaccgtgttccaccaggcaatgccagcgggcgatgatggtttcctgtccggcaagctcaccgtagccgatgaacgtcaccagcgagttgcggcccggaatgttgctgccgcgcagcgggctgccgccttcgctgatctcataggtgaagcgcagaatgtccccggcagtgaagcggtcggtaacgtcagttgtttttttcttcttggtggtcatgttcatttcctcagcattgcattagtgttttgcgccagtctgcgctttcgagatcgacgtagcctagcagaacaggcaccccttctgaactccaaaattcagaacggtaattcacgaacggctctatgtcgtaggcatatagcgcgccatccatatccaccgccacccaattcgaccagcgcggcacggttatgaccatgccgttatagttgaataccttaaacagcccgttagttatcagcttcataatcatccccaaagcacggaacgcgcgggtaggtcactggtgcataggcctcgatcctgaaatcgcggttacggtctagcggctggtagaatgaactgaactccgggtgaatgccttcctggcaccagccgacgaagaagaacggttcgccgccttcatcggtgcggccgtcccagcacgccagctgttcatcggtgtacccgcattcgtcgaaattaacgtaccagaagcggcggatcaggcggcagttgttacgcagacgcaccaccacccaaaactccatttcatgcccgtgctcaatgtccggggtgtcgcccaaagaccagactgacggcaagaattgttcgaatactggctctttctgtttcatttgcaaaaatcctctacgttgatgaagtcgggggtcataaccatgttgcccgcccgtaggaagctcaggccgaagcggtggatcagggtgctgcactggtcgatgtcgctgtagtgcatgcgacgccagaatcctttcagtgtcccgacgtcgtcccagcgcacttgcgggcggtcgatgaactcagcgcggacgaaccggccatagtgccaaacccattgccctggcttcacgtcggagacctccacgagcttagtggggaataccgggatcttactcatcgtgctttcacctcgccgtagtagccaacgtccatcaggtctgatacgacagcgatgacctgagccttcgcctcatcatctgccttgttgttggcaatggccttcatcactgcgctgcgggtgacgtcgaacatcggttctgacacgttacccttgcggtagcgctcacccagcttgcaggcgtccttcatgaccttatccatctgcgcgttatccggcaggcggtcgtatacaccaagatcgcgctggatattgatgttcttgatgccaacggcgcagctaacggcgctggcgtccccgacgtatgagcatcccagcacagcggcggcggcgatggcgatggcggtaatgcgtttcatcggttactccttattaccacggatggcggcgatggtttcaatgtggcggcgctcttcctggcggcggcgctcttcttcttcggcgatgttacgcatcaccagcagaaacaggatcgccagcagcggggagaacaccagcgacagcagcgcccaacccagtccattacgtccacgacggtcagcagcgatgcctaccagtaaagccagaacacaccaaataattaacacgctcatgattctctctcctgttagtcccggcaccctgccgggatctgcatattagtacggaataataacccgtgtcaacactatagaataattccagcgccgtgcgtgtaaacggtggcgatggtgagaagctcaaggcgtagcgacttcaacgccccggcggcggtctttgcgtcgatctcggtgacgtggctcttcgagtcggtataagacgccttaaagcggttgtgcccgtaggcgatgcagcgcacgcggccgaactcgacgacgacacggtaggtcttctccttcgtcttgtcgttgatagcctcaatgacgctgaacctcgcgccgttcaggataagcgagcagatgtgagcgccaatctcgcgggcttcgtcgtggctggtgatcttctttagctggtcaatcattgcgggcctcctcgcggcctgcgggcgtgatctcgcacgccacggtagttatgttccactttgccagcccacggctgacaagtccgttcagcgcagtgacggtatgtgacttgctgtcatagacccagtcgcctgcgcgccattctgagacagccagccgcttcaacacggcccgctgcctgatacgcagcttcactccgggcgacccccggcagccaaccaagcagcgtaagcgatagatcgcgtcagatcgcacttcatggtgatcttgcggtcttcatcagcgttgacccactgcgagaacgtcagattcagaggcataggctcaccctcagcggctgcgagcgcatggtgatagctgttcagcgacagcagcaaggagactcgctgccgggcagtcatttcacgcatgatcgcccgcacgcacatggaggcgctccccgccccttcatgcttgcgctgtcggccatcccagaactggaatttcatcgacagcggtggtcttttacgtccgtccataatttcctcctgttatgatatatattcgacggtttcagtaatgatcgcagcatatttgcagcgttttagcgctggtatgtaccagaaagaaaacatccgttcttcgcctgagctgtcgtcaatgtcaacgtgacacaaagacgcctcatagacgatcccactggcagcggtgacgcgaactcttgggtagacgatccccttccatgcgccatcaatgcccttcatgaacttgttggcggcttcgtctgcgcgaatgaacgacggttggtcgtggtaagggaagaaagcgacctcagcgccattaacgacgacggtgacgcatttactcataggctcctccggttgtggcccccgaaggggccggttgtttcagcagatatggtcaacaatatttatcagaaaggaagttcgctatcgatccccgtcacccgtgggcgggccatcatctcaaggtattccttttgtgcctgctcctgtgccagttttgcgagacggcgaacgctgaccatcagtttaacgatgaagcgggccgggtaacgatcgagggcaagcagatcctggcaaacgcggtcaacggcacgctgtacgccgatgtgcatcaggtagccgttgtgggtgtagtggcgggcaatctgaacagcgcggtcaacgatgccattaacttccagcgcttcggcgtgtgcttcctggcgggctgcgtaggcgcgctggccttcaacggcgtccagcagtttagccagaagcgctttcacgtcgcacaggctggcattagctttccactccgcctggttccagtcgtcgaggttagcggagatgtaaccttctaccgcctgctgcatatcgtcgtacatggtttcgtcaagggtgtcgacgttttcgcagatcagggcgttcgctgcggagtcgatgatcaggcatgccagcaggtcggcattcttgaactgtccacgggcttgctcgttggtcatccagcttgccggattgccgatggtcagatccagcgcggcgagaatttcgttagcggcggtaagatatttgatagctgacttagacattttgcgaccccttgtgatttatcggttatttactgcctgttcgataaatatattataggggccgcatcatgtcaatagtgcttacactactccttaatgaagtctttgaaatctgcggacgatgtctcgcgccaggtcatcagcctgccgttaatgatcgcgtgacgttcgcagttgtaatcgtcccggaatttcagaatggtcatggtgttcaggccggtcttggtggtcagcttgcgcatgctgcccgctttagcgagaagtgcggggatgcttgtaacgtggcaaatcaggctcatgttgttttcctcagtggttatcacggcagctacccataagcgggggaacggcatctttgatcgtgtagtaagggttccgggcttcgtgtgggttagactctttgctcaggtgtcccagctcagccattttgtaaattgcgtcgcgcactgactcccgtgaatacggcgtcccgtcagccttaaacaccgtggagctgatacggtgcaggatctccttgtatggcgcggttccgtgcggctccgccctcagcagagaatacacggcttcctgcaatggcgtgtacacgtgcgcctggcgcttttcctccggctcaaagtgctcctcatccgttccggcgtccatatcgtaaacgcggtcttcgaacagccagaccttcgtcgcgtcgtcgatgtagatgaagtctggccgatcaacctcctgccctggggcaagtttcttctcatacgtgcttttcttcttcgcctcaacgtccttcgcgaacaccggaacctgaaagcctttgagcttaaaccgccccttcaacccgccctggcggctcttaccgacgttcaggacggtgtagcctgtctccttctggcgggcgttcaatcccttgccggtctgtgtcttctcgcgcaccaggctgaacgttttatacaccgcgcccttcgctgcggatccgccacgagactcaagatcatactggccggacatcaggcttcccttgctgacatgcgggatgaagatcccggcgcagttgagggactcagcgaaccggtgcccggcagtggtgatcagctgctggtcggtgttgctgttttcgtccatgctcacgccgttattgttggccgccgccaggtggaacattttgctgtcgaagatgaccagattcaccggcctgccgttggcgaactgcaacacgcgactcttctggatgcgcaactttcctggctccatcaggtcggctggtcgcttgaacaccttgatccagtcacggagattgacgccggtgcgcagcgaccaggcggccacctgcaactcaacgctgtccgggtcttcggtgaagaacacgctgacgccggggttacacacgcggaagcagttgaacagcgggcgacccatggcgaggctgaccgccatttgcaccagcagcgtcgttttccctgcgcctgcgtcaccgttgatctcgttgatggtgcggcggttcagcagaccttcgatcaccgggtcatagaagtcaggcgaggtgttcagcacgtattcgccagggtcgtaatctttcagcgcgggatcttccaccaacccctgctcaacctcttcggcgaggcgctttgccacctcaacgcgctgggcggataagtccatcccgagattctgcttttcattctcctcgcgaacgatgcgttgcagctcaaggtggcgctgaccggcgtctttcttcttcggcttaggtggttcaggtggaacaggtggcgatacttcttccgcctgttcacgctcctccacctcagcacgtgctacctggtcgaagtaagcctgcatgtcggccatttcctgcgaataggcttcgtcctcttcctcgcgggtcattggctggttgaggatgtccgccgcttcgtgctgtttctcctgatcacccagtaacgccttccagtcgtcgggcgtcatcggccttttgttctcttcgttcatcgtttcctcctgctttggttcggacattattcacggcaggtaataccgtgtcaatatcaattactttccgcctgaaaaacaggctaaaacatgtaaaccaatactatttatagactgtaaatacccgctattgggattttcatcacgcctttagttttcaatggcttacagagtacgttttttgagcagctgtaaaccaaagcgattcaagcggagctaccagccacctcaacgccacctgaacagaaggagtgcttcgtaagttattgataacaaaggactacctgaaattttcaggaggaaaagggtcatactaccgaagttgcaagtgtctgatattgaagggttaatttcaggtgttaggtggtatccctattatatataaaacccatataattacagaaacacgtacacccttacgcac

SEQ ID NO: 68 - DNA, 169824 bp, unidentified
  source 1..169824: mol_type = genomic DNA
atgctcttttcgttttttaatccaatcgaatatcaagctaaaacgactggcagcaagaagataatcccgacggctaatatctatcgtgattaccaagaatattttgaccgtgtagcggttaactacttgcttcagaactattacattcaaggtgctccacgtccagaagaactgtcttatgaactgtacggtaacacgcagttctattggattctcttaatgtgtaacggaatctatgacccttatcatggatggattaaatcacaggatgcttgttaccaagcagctgagcagaaatattctaaagttggtgggaaccagattttgtatcatgttgatgccgatgggaacagatattacaacgtagaacaagttcctcctgattcaggtatctggtgggctaaaggcgagaatgattatactaaggattctcgcatccaataccgcggcgcgttagctccagtcgatgtctatgaagacgctatactagaaaatgaaaaactgcgtcagatcaaaatcgttaaccctgttgatatcgaatcttttttatctgatatagttcgtgaaatggaaaaggccccagaatgattgaaatgaatgatgaagtacgctggttcaccggcgtcgtagaagatagaatggacccattaaagcaaggtcgcgtaagagtacgtgttgtaggccttcatccgttccaaaaaacacaagggcctatttctggtatttctactgctgatttaccatggatgactgtagggcagcctactaactctgctggtatcagtggcgtgggtcattcaattacaggtattgttgaaggtagtacagtttttggtcaatggcttgacaaatataaaacatcaggcattgtgactcatgttttatcagcccatagtactaagaaacctaattatactgaagggttcagtgaccctacagggcagttcccaagatacttaggttcagatacgaacccgttgactcaagggtctgaaataggctataatagtaatactaacgttattcaggatgctaaccttgatgtaggtattaatcctgattcgacagatatcaatgacgctaagccagatgacaacccgaatttcactattgaaaacatgcttcgtcgagacgaaggccttcgtttaaaggtatactgggattctgaagggtaccctaccgtaggtatcggccatttgatcgtgatgcaaaaaataagagatatgactcagattaataaaattctgagcaatcaagtagggcgccaagtaactgggaacccaggcatcatcgaaatggaagaagcttctaaattattccagaaagatttagcagatgtccagagagatgttaaaagccatcctagggttggacctgtttacgctaaagtaaataggtcaaggcagatggctttagagaacatggccttccaaatgggtatccatggattagcaaaattcaaaggtatgttagatgcaatgcttgctgaagactggcaaacagcatttaaagaagctcgtaattctgtttggtttaatcagaccaaaggtcgcgcttcacgtgtatctatgattatcttaacaggcaatttagaatcatacggtattcctgttccaccggaacaggccaaaggaagaatgattcaattatttgctgcacccagttcagatgattctgacgacccaagtgctccatggactccaacagattcaaggattctgttcaaagagcctgaaagttcttataaaggtgaatacccttacgttcatacgtatgaatctgagtcaggccatattcaagaatttgacgataccccaggttacgaacggtatagactagtccacccaaccggctgttacgaagaagttgctcctgacgggcgccgtactcgtaaaactgttgccgatctttatgatatgacccaaggtgatggtaatatcatgatttctggtgataagaaagttaacgtcggcggaaacgaagtttattataacatgtacaatcgccgtcatcaaattgatggtgacaatactctctatatccgtggaaatgaaactaaaactgtagaaggtgacgggactctcatcgtcaaaggtaacgtaaaaattgtcgttgaaggaaatgcagatatccaagtaaatggcgatgctaccactaaagtggatgggaaccatgaaatgaatattggtggtaatatgtcttatgttgttgctggaactgtttcatggaatgtaggtgggtcttggactgagacaatggcttctatgagttctattgctcaaggccagtacactatcgatggtagcagaattgatgtaggttaattatggcccagataattccaataaatacaacattagaagaacttatagaaggtgactttgtagaccaatatttcactgcctctttagaggcagatgaaactcttaagtcaattactattactaactaccaaccagtaaccggtatcactgtagctcaaaaccattatacaggtaactataactcaattttcacatttggtgctaatgcgcttttataccgagaaggcgatgatttgaaatcagcttcagcatgggaggagttacctcctcctaaagaagctgatctatacttattcagggcccctacggcgctttctaagacatttacatatactgttgagttaatctatactgtaactactccggcggtccctggcgaaccaggaagtggctctgttgaagagaaaaagctaacaaaggtctactcgcaaacagttaaaggtaactggagtatttgggctaacaagctacgcgattacgtatacacggggaactaaatggcaggtttagcatacaatcattgcattacgacaggtcatgatgcttatcctccgaccgatgtaaatgctacacaatctaaagtattcaccggtggtatagctgtcgttcgtgacggcgatcctattactccacacacaaaaacaacgaagcctcatgatacacacggaggcgtcgtagaggctagaacgagtaaagtattcgttaacgggaagaaagcagcccaaatggccgatccaatttcatgcggtgacaccatcgctcaatcttcacataaggtgtttattcactaatggctactacagaaccagtaaattatcagttgacgcgtactgcaaacgctatcccggaagcattcattggtgcaacctttgatgaaattaaaaacaatcttattgattggctttcaagtcaatccgaatttcaagattacgatttttcaggttctcgaatcaacgtactgctggaccttttagcttataatactctttatattcagcaatttgctaacacggcaatatacgaaagttttatcggaactgctaatcttcgtagttcagtagtccaagcagctcaagaaaacgggtatcttcctgcttctaaatctgcggctaaaacttctattatgctagatgttacccacgacttaaacccggtatcaattagtattccacgcgggactaagttcttggcatatgcccgtgatacatcagcagacccgtattcttttgtcacgactaaagacgtagttgtaactcgtgatgatgataaacattattggcctgttgttgaactcgctcaaggtcgaattattcgtcagataattcagtatgaccctaaagttcctattttggtccgtgatcctaatatcgacagatcagaagttcgcttaatggttaacggctctgaatggaccaactggaccgatagatcaatggttcataccggaagcacttcgcacatttactatatgcgtgaaactgttgacggcgatacagaattcttttttggtgagggtgtagaaactacttctgtagctggcggtgttttggaagctaactttattggcggtctaaaacctacccgtaatgacacaataaccatagaatacatccgtaccgaaggtgatgttgctaatggcgccgtagattttagttatgcagacacactccagtatgttactgttaataaaatcattgaaaactggaccaattctcctgattatgtcggtgccgacggtggtggcgaccccgaaggaattgagcgcattcgagaacttgctatcctgaagcgtgaatctcagatgcgctgtgtttctaagtcggattatgaaagttttgttagttctcgttttggtaatatcgtccaggcagtccaatgctttactgacccagataaaccagggtacgcatttattgcaattaaaccaaaatcaggtctacaactgacagcggtccaacgtgaagacattaaagcttatttagagccgtttacattagctcctattactcctgctattatgtctccggattatttgttcatcaagcaaaatgttaaagtttcttatgctatgaacaagttacaagaatctgagcagtggcttgaaaataaaattttagatcagatcgatacctattatcgtgacgaagtagaaatcttcaatagctcatttagtaagtctaaaatgctgacttatgtagatgatgcaaatattagtattttaggttcatctgccacgattcaattggttcgcgaagttgttaattattttgttctgcctgaaagtggtattaaatactataatcaaattaataagcggactttagagtcaagcgacatttcttttgtggctaattccgagttgagttatcctgttagaatttacggagcggaccctgatgagttaggaaaagggaatattgttatagggcctttccgggacggtgatattgttgagaacgcacatattaagccgtacacaggatctgattttaacaagcctattatagaaggtcgtactaaattttataaagtcggcgaaatctcttatccgggtgataacatctattggaaccttggggctcttggtgtaacttcagatcgttttgaagaccaaagcatcgagctttattctacgccaagtcaagatattatcttctcaagagatggaacacttatcgtatttgagaacgatttacgccctcaatacacaactatcacattggagccaattactcaatgacaattgcacctttcgtcaccagcttacgtattcacaagctatcagcgaaccaggtcaatattcgttgggatgacgttggtgcaaacttctactattttgtagaaatagccgaaatcgaagatgaaaccggtcgacttctcgaccgttcttctttaagttggcgtgcactaggttataccactgaaaacgaatggttcgcaaataacttgcgtcctatgaccacgtacagaatgcgtgtacaatcgacagcagccggattcgaaccttcggaatgggtagaaactgaagactttgaaacatttgaagttaacgcctacacatttgaacagatgagccagttcatgcttatgaagccgttcattgaagaaaagttcattaagaaccgtatgaactatgttaacttcaatacggctgcattacaagcatcgctgatggctgaaaactttcctatctctactgaatataaagatctttcgcaagttagacagtatgttttaggcgaagatgaattccacgaaattcaaggacctatagaagcggtctgtgtagataaagacagaaccatgcttgctgaaatagatggcaacctctacctgtttgaacgcttccagcacatggtcaaagtatcgaatgataaaggccagaactggcattacgtacgcctctttagtgatcgcgtaggcaatcctgtttcaaggacatgtgtttatcaatccaatactactacatacgtcctgggctataataaagtgttctacgggcgtaaatctagcgatgttcgatggtcgtcggatgaagttcgatttagtgataacgaagtgacatttactaagttgggcgatcagcttaatttaggatttgaagtagagatctttggtgtatacgcctcatggcctggcattcttaacaccagagtagaagctatggccgttaacaatacccatttatacggagtagccagagacacagttcgtagaattaagttaaagcaagccccggtcgatactgttataggatctccgacattcggtgaaaagttatttgaacccgaaataatcagaataactggcgacgacttggctgtttgttataaaatggactctattggtggtaaggtctttgctcttattacaggtcgtttaaaatctgctgggcttgatgcctctgatcctaaaaacgttgaatgcgtatctaaagaggccgaagcaattaaaggggtttacgtatttgacgaagatactttaagctttagaagagtttttggtactacggccgaagaacgtaggagaattgagcatggatggtctagcatgtctactgatgggcaagaactgttctttagctcaggtgattttaggtataacgaatacgttcctgatactgaacttcctttagagtatccttctaaggttacagaagctatttcgtattatgcgccttatcagtatcatcatgataaacactggcatatgatgagcttccggtctaacgaaaatagtggatgggaagagtttaaaccgggtcgtatgaaattttatgccgagccttggtttaactggatggctcgttctgggaatagaaactgggttactacaacagatcaggctttagtggtttataataatactacttataccaagtatgttgataccctctctttaacagatcctaaccgtattttacatgaagtttggaataaaggtgatggtgtattctattgtcctaacgtagagttcgatagcttcttaaaatatgcctccggtatcatgttccatgaacctgatggtactttggtaggattctatgaattcgagtacagagtcagagattatgttaagattacttggaagcccaaaaatgtaatgtttaaggcatttttacaaaaccaagagcatgaagtcccatggaccccgacagaagatactggcctccaagacccagatttagttcctttagttcgtaaaatgatgccggacagttatttgcttcaagatactaactttgaagctttctgtaattattatttgcaattcatttctaaagggtatggaacgcattataataagcttctgaatctggttcgtgataagtaccctagagaagaacatgcttgggaatacttatggtctgaagtttataagcgtaatatctatctgtcaaaggagcggagagatgctgtagtacgtttcttcgaagctcgtaaaaatgacttctacgccacaaaaggtattgaagaaagctacaagttcctgttcaagcttttatataatgaggatgttgaaattgacatcgaatctaaaaacagcaccgagtatgatatagttgttgactctgataatatcaatgacgatattgtgggtcgtacgatttacacagcttcaggtcgttgcaatgtgacatatattgagcgcgaatatgttgatggtaagcttctatggcgtatgactattcataatatgataggtcgatttgtcgctggccaagaagttaaatctgaaaagacctcttttgaaggtatgattgttgtgggtgttcgtggtaaagaacttatttctaataccatagaatatattaaccgttctcgttcttattatgtgatgaaaattcgttcttctcttcctacttctagatacagagatgacgtactgagatttgttcatccggtaggtttcggcttcgttggcattactttgatcacgatgtttattaatgctggtcttagtatgaaacacgttgaaaccaccataaataaactcaagaactataagtgggactcaggcattccttcgtattatcctgacagaaatgctgcaatttctcctagtggaactatagaaagagacgcgtggggtgaccctatttactacgataatgtaaacaaaggtgttccttatccatgtactcaagaatatatcacagagaataataacagtcaattccaaggccaaggcccttgtgaaaggcgtaagcggcatagtcctttatttgaccagtctgcagtaacattctcttgttatagagaactggtagatgaacgacttaaagataatgtaggaaatcctcgtgatcctgagaatccaacccaggtcaatataggtgaataaatgtctacatctgcgttagcatcagtgaacagcgcgatttatcgcgctgttattacttctaaatttcgtactgaaaaaatgtacacgttctataaatccgtaggagatggaccagaacaaaatacaatgtatataagcttcggcaaatctactccgtggtctgctaatgaaaacgagccaggatttgctcctccgtatccttcggatagtaccgacggggttgttgatgtctggactaatatgatgggcgctgttaaagttgacccgagcatgctagactgtgttattccgaggcgtgattggggtgattcacgttacgacaactcaacatttttaattggtgatattgtagttactaataatgccccatataataaaaccgaagtaggcgctggttggttaatttataaatgcgttgacgttccaaaagaaggtatgtgttctataggccagttgtctaataaagatgaatgccttgcgctaggtggtaagtggtctccttcaagaacttctaccattgttcctagcggccgagcagataccagtggtggtaataacggtatcatagatacaggagatgggtactactgggaatatctttatgagatcccaccagatgtttctatcaaccgatgcactaatgaatatattgtcgttccttggccggatgaagtggctgcagaccctcaacgttggggttatcataataacatcagctggcaacaatatgactacgacatcatttaccgtcttaaagccaactgtgtgcggtttaaagctttcttggactcggtctatttcccagaatttagtttaccgggtaatactggcttcagacagatttctgtaattagtaatccgttagaagctaaaaagaatcctaatgaccctaatgttaaggctactaaaggatcttatcctgcggtaagtttgtttagacactctggtgaaatcatttatatggaaaatagacaaccaatcattaggtcaatggaccaaactgaagaagttagtattatctttgaattttaactagggagccgtgaggctcccatttttgtttataaatatctctataaacatattgaggtacactatggcattcacacaaactccaaaagaagtcgtaaacgtaggtgaaatcggtaacgcctcaacaggcgatatcttatacgatggcggcgttaaaataaacaaaaacttctcggatatttttaatgctttcggcgatcaacggctttttgcggctgctgaaggcgaaaacacccagataatccatgcaaccggatattaccaaaagctgtcatttgccgattatagcagtagtgaaatagctttaggaacttgccacgacatttctaccaacggccaaaagctcaatgttactatagctaaaggtaacgtcggtgaagctatttactttgtaaatgctgacggttctatttcggcagaaaccagtcttacaataacaactagtgctaatgacggattcgcttcaggtggtaataaaattgaaatagtttctccgtatactagggttgaagtctggtgtatttctaaagatacctcgggtaattgtatttgggattactctattacaagtatgtttggtcagcagcacgttcctttagaaagaacgtttacacttaaccaaacaggaaccgacattgttattgctggggttagagaatttaactctattaagcttttgatgagttatgtagctactccgccaggtaaaaatattcgacagtcttctgaaacccttttgttaattgattctagcatgaatcaggtttattctactgaatatgctgttataagaatgggcggcgaaaaaggtgaagatgaattcttttacgatgctacctattcagtaaattctgcaggtaaagtagtgcttaccgtgaaatcaaattacgctaacgctagactggcaattaaatctatcggtactcagaccgtcggtacaggaatctaataatgaaacaaaatttaaatattggccaagtagtcgacgacggcagcggagattatctccgccttggtggccaaaagattaataacaactttgacgaactgtactatcaattaggcgatggtacttatcctcacgccgctggtgcttggaaaacccactcagcagctacttctattcgacttgaccctaaaatgggtgatagtttcgcgattaacacacaggcggctcgtgtaacagtttatcttcctaaaggtaaaccttcggactacaacagcgttattcgtctacgtgatgtatggtctacatggcggttgtcccctgtgactgtggttcctgcctcaggcgatactattaaaggttctgcatctcctaagacctttaataccaactatcaagaccttgagctggtttattgctctcctggtagatgggaatacatcaacggcaaaaccattgaaaaatttactaatggggatttagctacagtttctaagaaatcaattattgccactgaagggcaaactgacttcttagacatttttgatggcgaagaatataatccagaatctctgaatgtctaccgccgcggtaatatgttgttttatggcgaaaatggatttgacccggttaatgcagattacggttctccaggcccaaataacactattgtggctttgaataaaaaagatgttcggttagttaagccttgttctgaaggcgatgtaattattttcgaaacctttttagatggtattggtgtatggcgtagctcatacaacaaagttactgttatggttcgcagtaacaaacttacctcagagaaaacagtccaaggctctaaaattgtagccgacttgagcaccctgcgtgaacttagtaccgcagatttaggtgttcttcctggtatagatatgaacccaaattctatcgaggtagaaataaacggtaaaagccaggttgaagcaggaacaggcggtcttccagaatttatttgtgaaggagctccaggcgaatcagctcaagattgtatagctaacggtgggacctgggtccaatcggactctgattatcgcttgatatttgatagtgacgggattaaagtttctggtatcagattcggtcaaccgtttgaagatcaggatatcattactgtccggtggtacaataacaacatcgggaccacgatgtccatggatgatattgtttctgagacagatctgatttatatgaatgccgaagaaacagtagatcttaaaaacagaatcgaatacactgattatcagaacccgagccaaaaaactaaagttgacgtgcctaatgagtacgatgttcggttatctaacatctcagcattttttgactcaatttatcctatcggaacaatttatgaaaatgctcataacccggctaacccgcgtgattatatgggtatgggtgtatggaagatgtacggtgaaggctacgcatctgtagggtgggcttctgatataagtaatccttactttgcattaaataataatgacctagacagttcaggtaggccgtctcatagcgctggaggcacggtcggcgaagttgaattccagatttcagcaaataacatcccagaactcaaatctgatgatacggttcttattgctgatgataatggtactgtagttatcggcgggtgccagttagatcctgatgcatctggtcctgggtattccaaatatagagaaggttctatcaccgtaaacaaaggcgctggtggcttacctatttctaacgttcaaccttctataactgtctatcgctggataagggtggcataatgatttttactaaaacacgtgaaggggctaaggtcccttcaagagaagctaactatcttcagtttgaattagaccctgaagatatttctgtaggtgatcaagttccttatgggtcggtcacactaaaacaaacacaacacggcgtttggtatcctaatatccaggcagcaatagatgatgtccgtgcgatgatccctagtgatattggcgaagttgttactaatgtaacaggtattagtccaggaaaaacacagcaaatcactcgggccgttttttcaggtgttgtcaaattagaagacgaaacctctgaagaaatagttgagattctaggtgttgccgttaaacttaaaaacggcgatactgccgagatagctgctgctaaatggctcaacattctcgaatctatggctgctgataaggttgctattgcagcagtttttagctctgcttctactcagaatatcgtagatatcactcacctggattaccagaaccatactttcgaaacttttaaatggaacggtattacagttaactttagtgttttgtctcctgctaaacaaggttacggaagttggaactttttaggtagcgaagataaagtatttgctagtaatactgttcgcttccattatttccagaggatctcgtaatggcccaaaataactttcagcactatagtgacttagctgaatacacaatttttaagccggctaatacagattggccggcttctgtagataatgttcaaaaagcattatcaatgatcggcgactggtctcgtactgatgttggtttacctgtagcaactcctacaattccaggtattgtggctatagctactcaaactgaagtagatgctggcacagtaacaaataaatttgttagcccggccacattaaaatctgttatcaccagaccagacgcaacgaccacagtaaaaggcttaaccagatatgctactaatgctgaagctgctggattcgctatcggtaatgctgctatagttccttctgcattaggccatgtttttactaatgtaacggctactgaaactagatttggtactattaagcgagccacttatgatatgggccaagctggtactgatgatactactgcggtaactcctaagcgcgttgtagaaatgattgcggcccattcatctaatccgccttcatatactatggcaacagaaactaatttaggattagttaaattagctactagtgctcaaattcagcaagggactttaggagatggatacgctatatctcctaaagggctgctcggtgctaaagcctctgaatctaagtttggtgttattcgtttatctactgcatctgaaacggctgccgggactttagattctgtagcagtttctcctaagcaattgatggccttgcgcggttctacatcccaatacggattagtccagctatctggtgttcctcagtccggccaaactgccgcaagagctgatgccgtcgtgtttaaaacaactactgtaaatggtaagcctttgtccggaaatattactttaagtgccggggacgtaaatgcttggtctaaaggtgaagctgataaccgctttatgcctagagacaggatggttggtaatattactcgcattgaaggagccacatatcttaactacagaggaaataatggtagtccggatacttggtattgtcaaagtccgtgggaaggcttttctactgtaggtatgaacgttgtttgtaaatttgaaagaaactacgacggtggtgataaccgtattttccagttctatgttcgtgttaatgggcaaagacaaggcggaatacttacattaaatatagaaaatactaaaggcggaagaaatggtcattcctggagattcgaggcgtatgcaacgggtaatttcaggttcggcaatattcctccaggagctagagttgaccttgaacctgttcaatggcaccgagttttacatgtagacgtactggccacattctgcacaaattaaggattcttaatgattatcaagcttgaaactttacccaatgtaactaaagacccaggtgagtctcaaaaacgaattgcctggattaaaaatggagagccgcttaatgcggcttctactcgttacggacacgaaggcgaacttaaccgagttggcgttcaactccaagagaacatcgaattcgtccaccatgaagtagaacgaaccgtagagcaagtaaacaaaaacagctctgaaattgaatctattaaagaatctttagaaattaccactgatgttgatgcagtaactcaggtttataaaaaccgtgatgatattgtactggttaattctgagttagatcttcacgaacaagaaatagcttctttaaaagaatcttcaacaaagttgaccgctgaagtaggtgtatataatccgaacttagatcctaagcaccgtactatacgtggggatattgtattcatcaaagatgaaatgggttcttatccgggacagaataaaaacggtgaagttgatttaaattctcctggttcaggcatgaaactccgcatcatttctaatagtgacgccatttctaaagttactgccagggtccaagatcttgaagataattttatcgattctgatgtaggtgctttatcaggccgaattgatgaaattcgtactgaaatagggcctaaaaccttagcaaatggaacttctatttacaacagaataattaaggcagaccatgatattggccttcttaaaaccacccaggaaaatatttctgctgccattaatttgtcaggccctgaaacaatttcttccagagtgtctactttagagtcgcgttctctatctatagatgctactattaactcggctggaactggtcttgttgataaagtagatgccatcgaagtaaaaattggttcagcttcagaaccgtacagcattttaggtagattagatgcgattcaaactacccaagatgaaattaagactgttgttggagccgatgcatcttctggtatacgcggccagatagcttggattcagcagaaaacaggtattgttggcccgggcgaaactccggaccctagttctattgaaggacgtttgactgaagttatcggcgtccagtctcagcaagaatcgtctattcaagatatccaggctgaactgggtaatggtactaacggtatcacgggccaattaaatgaagttcgtaaaactgtttacggtaatactggtgctacagatcctattgaaaaggatggtcttttagagtctgttaaaaagataaattcggactatgtgcaggatgtaactgacctgaatgcatacctccgtacaaaagaccagtggatcaaaaaatctatggcgatgggttcatttaaaggcaaagacctctcggcagatttaacaggcgatggttttgagtactcgtttggccctggtcttgtagctgccgattttaataatcagattcgcgttattaatagtgaaatcgttatcaacgactcggcaatttatgaggtgtcggcctctgctattattgaaaaagcccacgcggataaagttcttgatctggtattttacgttgatgacgtttctgtagaggttaattctataggtgttaaaaccgtagcaggttaccaagttgttagctttgattggcttggccagttagaagaaacagaccgattacgcctggctattaaagccgtcgaaccagcttctcaggtcgttttaaatgtagaagctgtcgatattactgtagttccggcgcgctaaaattaagggaggcttcggtctcccatttttgtataaatatgattattatatgaggactttttatggccggacaagttgctaataatccttctgaactgaaggaccttatcttgcgccgcatgggcgcaccaatcgtaaatgttgaattaactactgaccaaatatatgattgcatccagagagctctagagctctacggcgaatatcattttaacggtctgaacaaaggatatcaggttttctatattggcacggaagaatcggataacgcccagttcttgaatggggtgtttaatctccgaggccgtaatatatttgctatttctcagatagtacgtactaatgttggctcaattacttcaatggacggaaatgctacttacccttggtttacagactttcttatgggtatggctggcatcaatggtggtatgggttcatcttgtcaaaaaggatatggaccgaatgcattcggagctgacctcggatattttacacagctgatgacttactggtcgatgatgcaggaccttttatctccactacctgattattggtataactctgatacggagttgctcaaaataatgggtaactttatgaagggtgatataatcgtttgtgaggtatggactaaatcttataataacgtagattgggctgtgggtaatactgctgggtatggttacgctggttctaataatgctaaccaatgggggcttggcgaagtatatgataatcctaataaaggaatcacaggccaatttgccggtgaacagaaccagaaccgtgaaggcgcctataataaccgttgggtaaaagattatgcgcattgtttagctaaagaacttaatggacagattttagccaaacaccaaggcatgatgcttccgggtggtgtaactgttgacgggactcgtttaatcgaagaagctcgtatagaaaaagaagccttacgcgccgagcttgaactgcttgatcctgggtgtcctattttgctggggtaataatgagcacttataattcaaatctatttgctaaactcgaggaccgttctggctatgctaaaatcaatgaaactgagattttgaacccgtttgttaacttcaacaagtatactaacacccaaactttagctgatgtactggtagccgagagtattcagatgcgtggaatagagctttattatctgccacgccagtttaacaacccagatcttctgtttggagaagacccacaatcaagctttaataaggcttggatgtttgccgcttatttgaatagctttgatggttattctggggataatacgttctttagtaagttcggtatgtccgttaatgacgaagtaacatttactattaatccaaggttgtttaagcaccaagctggcggaaaagaacccgttgcaggcgaccttgtttattttcctatggataatagcttattcgaaataacttgggtagagccttatgacccgttctatcaagtaggtcagaacgcaatgcgtaaaatcactgcccagaaatatacttattctggtgaagaaatgcagcctgaactgcagcgtagcgaaggtatcaatattcctgaatttagtgagcttgatcttcagcctattaaaaatatagatggattggctgatatcaacaacgatcagtacgctgaaacagaagagattaatgctgaagctgcccagtatgtggaacctttctatgtcaataatggtcgtggaaattatgttcctcctaagtcatctccatttgatgatggattcttagatgattaaatagtctatatgcccggaacctccgggctctggagataaaatgtttggcttctggtacaattcgtctttgcgtagatatattgtattgatgggcgatttgttttcccatgttcaagtagcacgtctacgcaatgaccaaggtcttaaatatattaaagtccctatttcgtatgcctctaaagaaaaatttatgatgcagcttaataagtggacagctgttcaatctactgaagataaagcaaaaatagaaactattcttccaagaatgaatcttcatttagtagatatgcaatacaacgcagcttttaaaacttctcagcttaataggactaagtctcagactcaagacggtaaaactcctgtctcgcagtataaccctacccctattaagatgatttttgagcttggaatctatactcgtcatcaagatgatatgtatcagattgtcgagcaaattttaccgtattttcagccacactttaacacaaccattcacgagctttatcctaacaatatccaattcaagcgtgatatcaaaatagttcttcaaagtattgcgcctgatgagcaggtagacggtgacgctaattcgagacgtcgccttgagtggtctattatgtttgaagtaaatggctggctttatccgcctgttgctgagcttgaaggtgagatcaaaacagtttatttagacttctttgcaaatagtaaagaactttcccataatgataattttgaatctgttgatacagaagcggtcccgaggcatatagaatctgctgaatgggatggttcgtatgaacaaagctattctcaaaatattcctattccgtcaggagatgttcctcctggagtgaggcgaaatgagtgaagtactagacatgagcaagctgttggatatcgatagcttgccaggaattgaaggcgaagaaattcctgtatacgagaaattagaacttgttgaagttaaatctaaccctaataatcgtaaacctgaccttgaagacgattactcggtggttcgtaaaaatcttcatttccaacagcagatgctaatggatgctggcaagattttccttgaaactgctaaaaatgctgattctccgcgccatatggaggtatttgctactctaatggggcagatgaccgctacgaataaggaaattcttaaacttcataaagaaatgaaagaaattaccgacgagaaagttgatactaaaggaaaaggtgggcaccagacaactaacatcgagaacgctactattttcatgggttctccttctgatttgatggatgagcttggtgatagttatgaagcccaagagcgattagaaaagcaggttaattaatggaacagccagttaacgtctttaacgatgaccatccgttgaacgttggcgataatattgtaatcaagccgcctagttctatggcggttaaaacagaaggcgggatcaggttctttcagtctcagtgggaccagaagtggtatcccgaatcttttgatgattatcttcgcattaacggaatagtcaagattcgtcttcaaggcgaagatccaactaattttagaacatttaaagataaaaacaataagcgtactcgttataatgctcttcctaaccttaaaagagcaaacattaaaacggcttggactaaagaaatggttcaagaatggaagaagtgtcgagacgatattgtttactttgcagaaacctattgcgcaatcacacatattgactacgggaccattaaggtccaactccgtgattaccagcgcgatatgttaaaaattatgtccactaagcgtatgacgacatgtaatctttctcgtcagcttggtaagacaactgttgtagctattttccttgctcactttgtttgctttaacaaagataaagccgtaggtgttctagcgcacaaacgtagtatgtctgaagaagtattagatcgtactaaacaagccattgaacttctgcctgattttttacaaccagggatctctgagtggaacaagggcaacatcgagctcgataatggtagttccattggcgcctacgcaagtagccctgacgccgtccgtggtaactccttcgctatgatctatattgatgaatgtgcgtttatcccgaacttcattgatgcttggcttgctatccagccagttatttcatcgggtcgccgttctaagattattatcacaacgacgcctaatgggttaaaccacttctacgatatatggactgctgcggtagaaggtaaatcaggtttcgaaccgtacacggctatttggaactctgttaaagagcggttgtacgatgaaaatgaccgatttgacgatgggtggcagtggagccggcagacaatttccgggtcatctttagaacagttccgtcaggaacatatggctgaattccaaggaacatcaggaacactaattagtggcatgaaattagcggtcatggaatggattgaaaccgtccctgagcagaactatttttatcgctttaagcagcctgaagaaggtcataaatatattgctgctttagactgttctgaaggtcgtggacaagattatcatgcaatgcacattatcgatgtaacgtcagatacttgggaacaggttgctgtattacattctaacgaaatttctcacttaatccttccggatatagtgcataaatacttaatggaatacaacgaagcccctgtgtatatcgagttgaactcgaccggcgtctccgttgcaaaatctctttatatggatcttgaatacgaaaacgttatttgcgattcaatggttgatttaggtatgaagcaaactactaagactaaagctgttggttgctctactttaaaagaccttatcgagaaagataaattaattatccaccataaacctaccattatggaattccgcacatttagccagaagaaactttcttgggccgcggaagaaggtttccacgatgatttggttatgagtctagtaatttttgcttggctttcaacccaacagaaattcgccgattacgcagataaagacgatatgcgcttagcatcagaggtctttagtcgtgaattggaagatatgaacgatgaatacgcgcctgtggtatttgtagatgctgccgataatagtgcttcctacgctcctgcggagcctggaatttcattcgtataaataagataaagcaaatcactttgaggaataatcatggctttaatctctcctggaattgagctcaaagaaacgagcgtccaaagcacggtagtcattaatgctacaggtcgtgctgcattagttggtaagtttcaatggggtccggcataccaagttactcaggttactaacgaagtagaacttgttgacctgtttggtggaccgaacaaccagaccgctgactattttatgtctggtatgaacttccttcagtatggtaacgatcttcgtaccgtacgtgttgtaaacgaagaggctgctaaaaacgcaagcccaatcgctggtaatattgaatggaccatcgataccgcaggtactaactactctgtaggtgataaactgaccgtaaaatatctgactacggatgttgaaacagaaggtcgtattactaaagtagataccgacggtaaaatcctttcaatctttatcccgactgcaaaaattatcgcttatgcgaaatccatcaaccagtatccagatttaggcagttcttggactgttgaaatcgcaggaacttctgcaggtgtttctggtggcattagcttaggtaaaattgttgttgattccggtattctgttgactgatacagaaacggccgatgaaaaaattactaatactaccttccaaactgcattatctaagtatggtatgcctggtgttgtggcgatttatccgggtgaaatcggttctactctggaagtagaaattgtttctaaagctacctacgatgctaatgcggtttctctgttagatatgtatccgggtggcggtactcgcgcgtcaactgctaaatctgtattcggctatggccctcaaacaccagatcaatacgctattatcgttcgccgtgacgggactttagtagaaaacgttatcctatccactaagcgtggcgataaggatatgtacggcaataacatctttatggatgattatttcgccaacggttcttctaagttcatttttgctacttcagaaggctggcctaaagatttcagtggtattattcagttaaatggcggtgtttctgctaatgaatctgttactgctgcggatcttatgaaaggttgggatctgtttggtgaccgtgaagcactgcgtgttaacctgcttattgctggtgcatgcgccggcgaagaagctgaagtttcttctactgtacagaaacacgtcgtttctatcggcgatgaacgccaagactgtttagttcttatttctccgcctcgttctgctcttgttaatgttccgctaacgcgtgctgttgacaacctgattgattggcgtgaaggtactggttcttataccgattcgaacatgaacattaataccacatacgcggcaattgacggtaactataagtatcagtatgataaatataacgacgttaaccgttgggttcctttagcagctgatattgcaggtctctgtgctcgtaccgacacaacttctcagccttggatgtctccggctggataccgtcgcggccagattctgaactgcattaaactggctattgaacctcgtcaatcagcgcgtgatcgcatgtaccaggtaggtattaaccctgttatcggccaaggtacaggcgaaggtttcattctgtttggtgataaaacggctactacagttccgactccgttcgaccgtattaacgttcgtcgtctgtttaacatgttgaaaaccaacatcggtgatagttctaagtatcaaatcttcgagctgaacgataacttcactcgttcctcgttccgtatggaaacaggtcaatacttagcgaacattaaagcccttggcggcgtgtacgatttccgtgtcgtttgtgatactactaacaacactcctgcggtcatcgatcgcaatgaattcgtcgcatcgttctacatcaagccggcacgttctatcaacttcattactctgaacttcgttgctactgcaacaggtgcagatttcgatgaactgattggtgttcaacaataatataatcacctaccggaaagacctgaagtcattatactatggcttcaggtttagcattaaacccgtaggacgccgccaggcgaatcctctttagaggataataaattatattaactacaatttaaattatccctgacgtccactgacactttcaggcgatataaataagagagattactgatggaattaacagacatcacacgtgctttcgaatccggtgacttcgctcgtcctaacctgtttgaagttgaaatcccattccttggccgtaacttcagcttccagtgtaaagctgctactatgcctgcaggtattgtagaaaaagttcctgtcggatatatgaaccgcaaaattaatattgccggagaccgtacattcgacgattggactatcacaatctataacgatgacgctcacgaggttcgtaaagctattattgcttgggctgctatggctcattcccagggtaatgaaattacaggttctacccctgctgaatataagaaaactgctaaagttcgtcagttctcacgtgatggtaaaactgtcactaatgaacacgaaatcgtaggcctttggccaaccaacgtcggtgaagttgccctcgattgggatagcaataacgaagttgaaacatttgaagctacctttgcccttgactggtggttgtaattctggtagggtcttcggaccctatcgctatttcttaagcaaatgatcttacgaaatagcgatataaatagtagtaagaatcattattggagaaagtaatgaatttcaacattctaagtttattcgctccgtgggaaaaacacgatgagtccgaatataaacaacaaattagagacgatttagaatccattaccggacccaaattcgatgatggagctcatgaagtagaaactaatgagcaagatgccccgtataacgcgtttaaccaaatgatgtttggtacgcagttaccgggaatgaaaactactcgtgagcttattgacacttaccgtagtttgatgaacaactatgaagtagataacgcagtccaggatattatttcagattccatcgtttatgaagatggtcatgacgtagtatctttaaatctcgactctaccaactttagtgcaaatataaaagaacgaatgatggacgaattcaaagaaattttgaactgtcttgattttgaaagaaaaggtagtgaccacttccgtcgttggtatgtagactcgcgcatcttcttccataaaattatcgatcttaagcgccctagagagggtatcaaagagcttcgtcgtttagatccacgtaaccttcagtatgttcgtgaactaatcacaaaagaagaagccggtgttaaagtcgttaaaggctacaaagaatactttatctacgatacagctaatgaaagctactgcgtaaataacaaagtttattctgccaacactaagattaaaattccgcggtcagctattacgtatgctcattcaggcttagttgattgttgtggtaaaagcattataggttatcttcacagagctgttaaacccgcgaaccagcttaaactcttagaagatgccttagtaatttaccgtatcacgcgcgctccggaccgccgtatcttttatattgatactgggaatatgccttctcgtaaggcggcagcacatatgcagcatattatgaacacaatgaaaaatcgtgttgtatatgacgcttctaccggtaaaattaaaaaccaacaacacaatatgtctatgactgaagactattggttgcaacgacgtgatggtaaagcagtaacagaagttgataccctaccgggtgccactaatatgagcgatatggatgatgtacgttatttccgtgcagctctttatatggctcttcgtgttccactatctcgtatgccggaccttaataatcaaggcggtgtgcagttcgatgctggaactggtatcacaatgatccggcgaccaccgagatctacactaccaatcacacactctttccctacacgacgctcttccgatcttttccgtaaatttatccgagatcttcaacataagtttgaagaaattctgcttgatcctctgaaaaccaatcttcttttgaagaaagttattacagaagatgagtggaataaagagataaataatattaaagttgtgttccaccaagactcatacttcactgaaatgaaggatgcagaagtgatggaacgtagaatcaatatgctaaccatggctgaaccgtttattgggaaatacatttctcaccagtatgccatgaaaactttcttgcagatgtctgatgaacagattgatcaagaagctaagcaaattgaattagagtctaaagaggctcgtttccaagacccagaaaatgtagaggacttctaaatggaagaattaatggaagcaattaaggctaacgacctcgttgcagtacgtaaagccgtggctccactgctgcaagaacggacgtctagtttaattgaagagcttaaagtcaaaattgcaagctcagtcatgatcgaaggcgaagaacctgaagaagattcggaggatggcgccgatgacgatgacgagaaaaaagaaaagaaaaatgatgacgacgccgatgaaggcgacgacgatgacgacgatgaggacgacgaataatgttgatactccctgaaaatttcgaattagttatcgagaacgttgaaagcaaaattcaagaagctcagggccgcatcgaccatttgtctaaagcattcgataaagacggtataaatacaattgtagagaacatgatggctagcgaaaccgaactggccatcgcaatgggtgctctcaatgaagatatgcaacttaatgaatttatcgttaagcacgtcaatagccgcggtgaagtgacccgccttaaagaccgaaaaacgcgtgagcgtaatgcttaccaaactacaggtctttctaaatcgaagcgtcgtcaaattgctcgaaaagcggtcaaatccaaacgggcgaatccgagcgcggtaactcgcggtattcgcaaacaaaagaaagctattaaacgtcgtcaagcactaggactgagctaatgtcaaacgtcaatgaacaactcttaattgagaactggggaataccgggtgaaatcattgatggaaaacctatgctcgaatcgtttgaacagccttcagacgggtcgagcggtttaaagccagggctgtatattgaaggtattttccttcaagccgaagtggtaaaccgtaataaacggttatacccgaaagctgtcctagagcgtgccattgaccggtatataaccgaacaagttaaaactaagcagtcattaggagaactaaatcatcctcctcgtgcaaacgtcgacccaatgcaagctgctatcattattgaggatatgtggtggaagggtaataacgtttatggacgcgcacgtgtcatagaaggcgaccacggtccgggtgataaattggctgctaacatccgagcaggatggattcctggagtgtctagtagaggcctgggcacattaaaagattcaggtaaaggatataacatcgtacaagaaggttttcgcctgacggtaggtgttgatgcagtttggggtccctcagctccagatgcgtttgtagcaccacgagaaattcgtgagtctacagaaaaggtagaagcaactgccaagatgaatgctgataaagcatttaccgctctaatcgagagcctagaaaagcattataaataataatgtaacttaacaacaggacaccaaaatgcttaaagaacttctgatgaccgaagctcagactattgatgctaaagtcgaactagatagcattttcgaatcagttgaactgtctgccgatgttaaggctaagtttgaaactgtttacgaaactgctgtaaaagccgccgctgtaaagctggctgaatctcacatcgaaaaaatcgccaccctggccgaagaaaaagtcgaagaagaaaaggaaaaagccgaagaaaaagctgagaaaaaaatcgctgaatctgccgctaagttcctcgaccacgttgccaaagaatggcttgccgaaaacaaactggctgtagatcgtggtattaaagctgacttattcgaatccatggttgtcggtctgaaagatctgttcgtcgaacataacgttgtggttccggaagatgctgtagatgttgttgcagaactccaagaagaaatcactgaacagaaagctgaaactgcgcgtctgtttgaagaagtaaacatgcgcgatgcttatatcaattacgttcaacgcgaaactgctatgaacgaagctacccgcgacttaactgaatcccagaaagagaaagttatttctctgactgaaggtttggaatattctgatgcattcggtactaaactggccgccatcgtagaaatggtacagtcctccgctgaagcttcagcaattgtcgaaagtgctgatataaatactattgacaaagatgctgagggtcttaacttcactgtcgaagctgtagaacccgaagaaactcctaaacaatccggtggcctgatggctgcatatgtcgcttcagcggctcgtatttcttaatttaaaaaggttattaacacatgaaaactaacaaactcgtagaaaaatggactccgctgcttgaaggtgaaggtctgccggaaatcgttggcgccggtaagaaagcactgattgcaaaaattatggaaaaccaggaagcagctattcagactgaaccggctttccgtgacgaaaaaattgctgaagcttttggttctttcctgagcgaagcagaaattggcggtgaccacggttacgatgctcagaatatcgcagcaggccagacctctggtgctatcactcagatcggcccggcagtaatgggtatggttcgtcgtgctattcctaatctgattgcttttgatatctgcggtgttcagccgatgtccagccctaccggccaggtatttgcactgcgtgcagtatacggtaaagatccgattgcaccgggtgctaaagaagctttccatccgatgtttgctccggatgcaatgtattcaggccagggtgctactgctcagggtcgtgcattccctgaaattaaagcaggcactgaaatcaccgaaggtgatattgttaagcatgtattccaggaaaccggtattgcttacttccaggctgttgaaaccgtaaccccgggagctgccgctgacgccgccgcactggatgcagttgttatgggactggttgaagccggtaaactggctgaactggccgaaggtatggctacttctatcgctgaactgcaggaaggcttcaatggttcgaaagataacccgtggaacgaaatgggcttccgtatcgataagcaagttatcgaagctaaatctcgtcagctgaaagctcagtactccatcgaactggcacaggatctgcgcgctgtccacggtatggatgcagacgccgaactgagttctattctggctactgaaattatgctggaaatcaaccgtgaagttgttgactggatcaactactctgctcagcctggtaaaaccggcatgacccagaccattggttctaaagcaggtgtgttcgacttccaggatccgattgatatccgtggtgctcgttgggccggtgaaagctttaaagctctcctgttccagatcgacaaagaatctgctgaaatcgctcgtcagaccggtcgcggtgaaggtaacttcattatcgcttcccgtaacgttgtaaacgcactggctgctactgattctggtatcacctatgctgcacaaggcttgggtaaaggctataacgttgacaccactaaatccgtgtttgcaggtgttcttggcggcaaataccgcgtctacatcgaccagtatgctccgcaggactacttcaccatcggttataaaggcagcaacgaaatggatgccggtatctactacgctccgtacgttgcgctgaccccgctgcgtggttcagatccgaagaacttccagccggtcatgggcttcaaaacccgctacggtattggtattaacccgttcgctgattctaaactgcaagctcctggtgcacgtattcagtccggtatgccgtccatcgttaacagcgttggtaaaaacgcctacttccgtcgtgtatgggtcaagggtctgtaattttaaaaacctttatgggagagctttcgctctcccatttttgtttgtagacctttataaatagaattatatcaacccgaggaaagcgcaatggctaaaattaacgaacttctgcgcgaatcaactgtaacgaatagcatccaatatggtcgcccgaatctcgttgcattgacccgcgctactactaaattggtttacactgacatcgtcgccgaacaacgtactactcagcctgttgctgctctgtatggtgttaaatacgaaaccccagacgatgaactctcttttaaaacaggtgctacttacggcggtgctgcttctgcatctgaccgggatagtatagaagaaattacttctgcaacacactctgtgacggcagggacactttataagtataacaatgtggtttataaggccttagaatcgggtgctctaaacggcgctacgattgacgaggcgttgtctgaagcccttatcactttaaagcttcgtttttattctgaggccgctgaaacggctaaatttgaatctaataatgtagaaattagttctgctaattttactgttaataaatggaatgccagagttaaaacccgtaagctgaaaacttctctgacggttgaactagcccaggatctagaagctaacggctttgatgctaatatgtttcttgaagatcttcttgcaacaacaatggccgatgaaatcaataaggacgttcttcaatccttgattacagtttctaaacgttataaagttgcaggtgtttctgacgacggatccgttgatttatcttattcaagcgcccctgaagcggcccgtaaactttaccaattagtttgcgaaatgaacagccatattcaaagtaaaacttcttattctggaacctatgtcgttgctagtgctcgtgctgctgctgttctggccgggtccggatggctgaaacaccgccctgaagatgatgaatacctttcagaatctgcgtacgggttcctggctaacggtcttccagtatttgttgatgttaacagcccattagattatgtcactgtaggtgttaaagaatccttcggcggcagcgaagttatcggatctttgttctatgcaccttatactgaaggccttgatcttgataacgatgaacatgtcggcgcctttaaggtagttgtcgaccctgattctttacagcctactatttcgttgatggttcggtacgcgttgtctgctaatccatataccgttgctaaagatgaaaaagaagctcgagatattgatgcaaccaatatggataagatggcaggtcaaagcgacatgtccgtccttctgggcgttaaactccctgctattttaagtgagccataatgaaaatagatcgattaatccaagaaagtactttaacctcttctaatcaggccgggaggcctgatttactttcatacaccaaagcaactaataaaagaatctttaaggcccttgtagcagaacaacgcactcgtcaacctgttgccgctttatatggtatcagagttctgaaccctgaagataatatgacttatgtgggtggcgctacatttggcggacttatgggtcctgaatcccgtgctagtactccggaatttgtcggccaagccccatataataaaggtgacctgttcaagcataactctgttgtctttaaagcccttgaagataatccttttgctggatctactgaaaccagccatgatgagcttatttctgaagctattgcggctggaactatccgcatggtttctgacgcggcccctactgctcagtttgaggccgggcatcctgaaatagctgaagccgggttccgtgtcgataaatggcaaactacggttaaatcccgtaaacttaaaacttctgttactgttgaattagcccaagacctagaagctaatggattcgatgcccctgatttcttagacgatatgctaggtatccagatggctgaagaagtaaacaaagacattcttcaatcgttggttacagtttctagtaggtttaaagttcgcggcgtatcatctaagggcgttttagaccttacagaccctaaatatgataatgcccaggatcgtgcacgtacgttgtattactatatgtgtgagatgaattctgccgtccaacgcaatacttcgttcgccgggacatatgctgtggctagttctcgctgtgcggctattttagctgcttcaggctgggttgaaaaacgagatgatggcgatgagttagcctacggctatctgaagaatggactgcctctttacgcggatatgaatacgccggcagaatatgtgattgttggtgttaatgcagatatgggtgaaggccagacggtggcatcattatattacgcaccgtatactgaaggtatggatgtagaagatgacattgatcaaatgggcgaattcaagatagttgtcgaccctgattctttacagcctactatttcgttactcgcacgttatgctttgtctgctaatccttacactgttgctaaagatgaaaaagaagcccgaatcattgatggctctgatatggataaaatggctggacaaagtctgttaagttcttacctcggcgttaagttaccaccgctcgagaaataggaccttcgggtcctttcttttttaaatcacacaaaggataataaatgtctcttaatcttatcgttaagcctgaattatatactaattttattgctctcttagacaatcctaagattagtacttcaacattaatcgacattttgaaaagcgcatttcctaattatactagctcatgggaaactacaggttcatacagtgctaaaggcgaatcggctttatactttctaactagaagtatgataacttctccaagcgagcagtattatccgtctgaagtagcttctatcgagcaggttagtgaaaaaattagtaatcaagatgctatatttttaaaagaaaacactaaagaatacttcgattggcttatagcctgcggatttgtagatgctgcgtatggcgaggcttcttctacaggattcactgcattttttagccataacccaaaaccgaaaagaataaaacctgaaccacactttgcttctacaataaaaactactatagaagctaataatatgccggaggatacaggcgtgtttgaagtaaccttagataaatcttttaagtataaactagttgctgatttagaagtatcatctgtaaaaagtactttagaaaaaatagctaacggcggagctaaaacattagaagaattaaaaattactagaaaacttggttataataattatggcgtgtcttctacttcagaggccgattgcgttggagtagcaactattcttaaaaattggctagtagattccgggttcccagatgctaattttgtggttagtttaagccagaatggtgtagagtatgaatacactttaagttgcgcatagcaaataagggagagcgaaagctctcccgttaattttagtttgaaaccaattcaatccacgccgggcgaagcacgtcttgtaccagcttagtaatttctttcttcacgatatcaggttgttctgcctgaataacctcgagcccttctcgttcagcttcaataaggatatcttgaactgtcaagcccatgacctttccaaagtctttaggaccaaccttaccgatcttactaataacgttatttacacgctgaatagtaacgtattctgaaaacttctgaagaatatcttgatcaatttcagtcagaacagctttaggcttaataggcttatcagatttagctttttcactgaactttgagttcttacacttgatagcaacacggctgccattagccaagaatagtggatagttaggcttcagtacataaccttctgccgtgttatcagtagcttcttcggccgaccagactcgggtattagcatttctgagatcttcagccgcggcttcgttgtaacgtttaacgttaatctggaactcattaggcagtttaattagttcatcaaatgaaccacggcccatcagaggtgcaaccttaaaaccaaaggtgcaacacatctgttccatcataaagtcatctacgaactggttagtacctttatcggttttaaccaagatatcaaagacatagaagtctttctcgccgtaatcgacacctttctggataccaccaccagcgaattcaccgaagatctgcatactacagccttctttaattgtattctgtacggctttaatagagtcgttatatttctttaaaataacggtgtaaccaaagaaatcttcggctggaagaataggacctgtgcgcttcgcgcatgtgactgcgtcacgttcaatgataatagaaaagttggtaccatgaatcttttcacgtgcacaccagccttcagttacatcataaccatggtgccgaatcttttcaataaatttattgttgtagtggttctcaagactagaatatttctcaaacacatttcacctctaaatatcagaacaaacataattaaaagagtaaagacttctaccgccagtactcttagcttaaacccattataccgaatataccacaaaaatttttaaagcatattagaatgtaatttctacccagtcaccgtcacgttggtcatgcttccagttaactaccacaccgtcgtcttgcatccatttaatcagctggtctttatatttctttgccaatgaggatggataccaattaaagtgacgtttgcctttcagagcatgagctttaaattccagttcaacttcgtctttagcttttttcaattctgtagtagcgacagagtccgccagggcaccatagtgttctactaatgtagaaacacgtggctcgttaacgagggccttcaggccgccaataggttgccctgattcgtcccatccttgaatacgccgagattttacatctgattgaaatgcagaatcatgcattataacacctcattttttcaactaatttagtatggtctgtaataagccgtttacgataaattactttttctcgagccttggctcgctctctggctttttcgacttttatccattcctgcatagcttctttagcactgataccaaactgtttagcgatgtcaataaaactagtaccagtttcatgcatcatatgaatctttaatgcttgcatggttagctccacttagtgatgttggggttattaaatcataaaagttttaaagctaactccaaggcctttagatgcccatgtggggccgaagccccactattagtagatatagtcgtagattattccaacatcaagagcagaccggtgaacaacacgaccgtttctagattcttggacatcgacttcagggtaatcttctagcattttagccagggtataccgatgcaagtaataatcgctgtcaggatcatccagtttccaatctttgccttcaagagtcattcgttggatttcatccattacccaccatccgcaccagatataagctgaacctctgaacgggagcggatgaacatacggaagttctccgtctggctcaggggctactcttttggtaattgttacatcaccagtggcggtaactgtaactggattgtaatcttccgcggaaacctcgacagaaaccccaattacctgagatcctatatcagaagtgtcgatcgctaaagtgctggtagatccttcaataggagaaccgtctttagtccatgaatagacccctgatgcaccgacaggagcaccgataacgtcagctttaaaggacgcatcagatccttgttcgactgtaatagactcaggggtcaaaacaacagaaaccccactcatcgtctttttagtaatagttacattaccagttttagtaactgtagctggtttataatctggagcagaaacaacagccgaaacctcaattacctgcgacccgatagtagatgtatcaacttctaaagtactcgttgagccatcaataggagaaccgtctttagtccatgaataagctacagatgcgcctgaaggtgcgccgataacattggctttaaaagatgccgctgttcccttttcagcagtaattgaactaggtgacagagtaacagaaaccccactcatggtctttttagtaaaagcaacagcaatgcctttagttgcagtagccgggttgtaatttgctgcagaaactgtgacttcacaattcaatgtgtaattagcctctgctgactcagttacggtaatcgttttagcagtctgaccttcaataacgacagtaccacgtttccagacataagcgatacttgcaccttctggagcaccaacaacgttagctgtaactacctgagactgcccaatctctttggaaacagaagtcggactcaaagtaacagaaacaccgctcatggtctttttagtaaaagcaacagcaatgcctttagttgcagttccattattataatctggtgcagaaaccgttacttcacaattaagtgtgtagctagtttccgctgattcagttaaggtaattgttttacctgtttggcctgcaataacagtagtaccacgtttccacacataagcaatacttgctcctgccggcgccccgctaacatccgctgtaactacttgagattgaccaatttctttagaaacagaagttgggctcaaagttaaagtaatagcaggcatggttttgttcttaaccgtcagagtagtttccgcttcagccgtttcaggttcgccttcagctggagtgacagtagcaactactttaacagtcttactacctgcaggtcctgcagcaacataattcatagctgcagtaacagaagattgctttacgccgtttacagtccacacaaatgattctgtgccttcgaccgcagcaccagacgtggttgcagtaaaattagttgtagccccaatgactgctgaagcagccaaaggagcaatagatacgctataagccatagtcggtccttattttaaagttacaaacgaagaattacgggtttcacgaatcataatagatccgtttcttttgatgtaataaattaaactaaacagtgtctggtgtgcactggggtgtgggaagctggtaggtcttgatttccagtctggattgtctttaatccactcgtaaatccaccacggtaaagtcacgtaccctggatttcggcccatcagaataaaatgaggactaaagttttctggtagttcaaaaatagtttcgtcagcgataattttagatacagcttcttcaaaggtattttcagaaagcttagcctttggttcatcgaattcacctataggcgcctcaatatgaatagctttttcttcaataactgattgattttgaacgggttctttgatttcgtgaatagatacaggaatttccggagaatcaaataacagtttagcttcaggcttagcttcttcatcactgattacaaaatcagtcctgccttcaagttcgtcatcagcagcaataagatcactaatactcagaccttcgttatcttccggcataggctcttctgccatctttttaaaagcggcttcgatgtctaagactaggttttcaaagcctttactctttttcagtcggatattaaatccttcggcatattcaataagtttggctttggcctcttttttattttcaagacctcgaaggtcatcaatatattgcttatccatagtgtctctctttctagtgtataaatatgtatgtatttataactgaggctatacgctgtggacatcaaattaaaatttcatgattttagtcacgttctagttgaatgcgatgaaggcatcttctacgaactaagagactttttctccttcgaagctgaaggctataagtttaatccaaaatttcgttatggtcaatgggacgggcgtattcgtctattaggttacgacagattacttccatttggtctggtgaaccaggtacagaaattcgccaacaacatgggttacaaagttcacgctgaccctatgatttttgagaaagaagaaatcactcaagaatcctttgataaatggctcgattctaaagaaatctattctggaatgaccaagattacacctcattggtaccagaaagaagccgtgtttaggggtcttaaagaaagaagggctctgttgaatttacctacatcggcaggtaaatcattgattcaggcgctcctgagtcgttattatgtagagaactatgaaggcaaagttctaataattgttcctactactgcccttgttgaccaaatgatcgacgacttctgtgattatcgtttgttcaaaagagacaatatgcttggtatcagaagcggtactaagaaagattcttctgcagtggtttatgttagtacttggcagactgctattaaacagcctaaagaatggttcagccagttcggtcttatgatgaatgatgaatgccatctagcgacaggtaaatctatctctaccattattgccgggctaaataactgtatgttcaaattcggactttccggttctttgaaagacggtaaagctaatttgatgcaatatcaaggcctgtttggtgatatctttaaaccggtatcaacatcccagctgatggaagaaggcgctgttactgaacttaaaattaacgccatcagacttcggtatccggataacgttactgttgctttgaaaggtaaaacttatcaagaagagattaaatatatcacttcagttaaacgccgcaataaatggattgcaaatctggccgttaaattagctagtaaaaatcaaaatgcctttgtgatgttcaagaacatcagccatggcaaagaattgttccagatgattaaagacctgggacacgacaaaatattctatgtatctggtgaaattgatacagatactcgtactgctcttaaaaagatggcagaaaatgaagccggaattattgttgtcgcatcgtacggtgtgttctctaccggaatcagtattaagaatctacaccatgttattttagcgcacggtgttaaatcaaagattattgtacttcagactataggtcgagtacttcgtaagcatggctctaaagaggtagcaacggtttgggacatcattgatgactgtggtgttaaacctaaatctgctaacgccaaaaagacttacactcatattaactacttactcaaacatggcttagaacgtatccagcggtatgctgatgagaaattcgattacgtcatgaaacttgtcgaactctaaggaaccactatggactttaaacaatttttatacgaagccgccattgaagattttatgtctaaagtaaactcttgccggacccttgatggccttaatgagttggaaaaatattacaaaaagcgcgtaaaagaagctgatttgaaggattctgatgatatcactattcgtgatgcattggccggtaaacgtgcggaactggaatctatcgattctgatgaggaagaagaaaacttctaatctctagatacaaaaaaggctctccttacggagagccaagaataaccaataaggttacacactagattaaaagctgcacttcgttaagttgctgttctgtattctcagtaactggcatctcaactgcatgattataacattgaccgggatgaaccggacctttgtctgattgaacaaccaatacatcatcgattggagtcttacagacgacacaaatacacgacatggttgtctcctctgttaataaacttatttattacgcttcacctgcttcgaatttacgaagatcaataattgcttttatcgcgaatcctcgagctttaatagcatccatagcatcactgcagaattcaagcagaataccccagtactgaagtttggtttcagttcctaagatagtttcgtcagcagccattacagtttttagttcagacttttcatacgaatccatacacacttcttcgccaggctctacacgtcccgtgtagtaatcaagccttttcttcatggcctgttttttcatagcttcaatacgaagcatttctttacgacatatagagtgcttacgtacccaccgcccgtagacaacaggattattggcagcttcatactgaagttttgtctggtcaataactaaatcccggtctaattcatcttgtaaatcttccaacttcatttaatcaccaatctcaatttaaaggacctaaaccattatacacactattgacgagaagcacgtaatttgatcttgatgcgttctaagacatccgggtcgtcgacgatagaaaacatcactgtaacaactacagcattatcatcgtataaggccaagacctcaacacgcaggcgttctacccgtggctcatatgtttgaatagccgatacaatattacgctgaattgtatcagcagttaacggggtcatgttttcgaacaactcgtccgaaaggctacatccaaaatctggattaaaagggcgactgccctttcttgtagtgataattcctaagatgctattttttactgctcttgcacctacagttcttgcaacgtctttatcccaggccattctaaggtccgggtctaaatccgaatacatatggtctatattcattggataaccttaaagaactctttgagtccggtaatttggtgtacatgattcttcccacacttgcaagaaataggaactgccagctgtatctgtggcttcagtagcatatcttttattttcagaacatcttcggtagttatagcagaataaaggtcatctatctcttggtctgataaatcgtcaacaaagatctgctcgccattaacaataatgtaatcgatagatttagctatcattaaagcgatatcattgtcatcaaataattcagggtatttgaactggatacgaagttcacctagggaatataagagatcgctagagcccacgatttgaatacggttagtattaattggcacgtcgatttcgttgccacagtcgcacacccaggtggctgtatgattaacttcacctaatgaatgggcccacagattaactagaagaagttcagattcatgtttatttaagcctttagcattagtacaatctttaatcagctgcttaatcgttttatcaagaaccttatcagctttagcttttataagattcaaatattcttctagtgtaaacgctcggcaagaaatatttttgccatttatagttaggtcaaaattataagttgtcatatgttacctctagacgtatttataaatacaataaaataagaggactccctatggctaatatcgtaagatgtgaattaccagacggtgttcatcgattctctccgttcacagtctctgactatagagattttcttctggtacggaacgacatgaacactaagtctccagaagatcaagaaaaacttattgaagaactccaaaacgattacttcagtgatatccctaaagaatacagggcatttgtgttcttaaaagtctatttatctagcataggtaagactaaaatcccggttaaggttgagtgccctaaatgcggaaaagctaaaatggtgttgattaatttccaccaagaagcagttgagcttcctgtagtcgaagtgtccgggcttagacttaaatttaagcacccatctaaaaactataaagaaaacatagccgggctagtaacagaaaacattttgacagtagaagattctaatggggtctatcagtggtctgagctgtctacagaaaacaaagttcaagttgttgaagctattgatatagaaaccttagaacttataatcaaaaaattgaacatatttgactttgtactaaaatactcgtgctgcgattctcatgagatccattacactaattttatggatatctttaagcttcttctgaacccagatgaagtatttacattttataaaatcaatcacttgatagttaaacaaggctacgacctttcttctgttatgaatatgattcctatcgagcgaagcatcacgttatctctgattgaaaaggacctagcacaaaaatgatttcacaacgccccggatttccaaatgttagtattaagctttatcaaaactatgataagtggcttgataatagcttcgttgaactcggcgccacatttaccaccttgaccatgagagatagtttgtctggtattaatgaaggtatgcttcagttctatgattctaaaaatattcacaacaagatgaacggagaccaaattattcagatctctgtttctaatagcaatacatcgagaacacaaacacgaatctatggaataaaacatttcacagttcgagtcgatgataagggcgataatattatagctatccagcttagtacgctccatgatataatgaatttgaagttcagccgttgcttcttcagttcagcttatgaaaccttggttgaaatgataggcgtgatttaccaaaaatatcctaagctggctccgcctataaacggaataaacacatatgttcctaggattccttggacttctaatataaaggaattcatgcaatatatccgagatgtaggtctatctgtagaaagcgaccagtttgtttttgcttgggaagacataactggtataaacatgatggactacaatgcgatgattgctcagaacgcggcatcttttgttgtcggtgcaccccagactattgggcaattcgcagaccagttgccagtatctttagcttgggattttgaatggcttgtaaaagctaacgcttatactagaaacccattcaaagacgctacgttctatgcccaaagttttacggataaagaaatcacaaaaataactgtaggtgaaggttctaatagtatctatattaatagaagcggcggttattcagaaatgatttatcgtaacggttacgaagaagctaaccgcatcgttactatgtctcagtacgatggctacgcgtctgctaaaatatatggtaacttcgaagtgactcctgggatgaagttaaacttctacgatcctaaagaacagttccgtactgatttctatgttgatgaagttatccatgaagtcagtaataaccagtcaatcactaacatctatatgtttactaacggttctactattgaaccagttcaaatagcgaaggtaaaaaatgaacttaaacgtgattctgcctattaagaaaattacaattgatggtattgaaatttcattacctaagcttggacttaagcaccacaacttaatgaaagaagtaaaaatgccggatgaaaatctggcaattcttttagattctattaaaccaggtctagatgctgtacaaagcgatattgttctattacaacttttggcctttaacggtaagattaaagaagaagttgaaaaggatggattcacctatcgcttatcagatgtgtacggatgtcgtatattaacacaccgtttaaacggtcaagaatataaatttaatgcccccgaaaggtttagtaaattcggctcggccgacgcaattcttgacaagtatttttcttctgtagacggcagaacagagaagcctgattttatgaagcttccagcattcgtaattaaatgggttgacggcatcgttaacactgtagctattccaggtcctaatgggcctataaaaggaattggcaatataataaggctctttgaataatggctagaaaagtaaacagtaaaacacaatctctgcgtcgggtaattgccgacgcagcaccacaaaaacgtaacgaagcactacaagaagaacaaaacaattcactaggcactattaatggatctcttgaagggatccaagccgctgttgaaatgggtgccgaagctacagagaatggtcttgctaatgtaggaaattctttatctgatactaatgccggcatcgaacttcaattagatgaattaagtgctcttaataccacagcctctttaataagtgacagaatcaataaattggctgaaaaactaggagtaaaagtcgaacaagcaactccgcagacagcaaatgttccgtctgtcgaggttgtacaggattctattcctgagccggttccggagattccatcgttagacgatcttcttcaagaccttattccgccacatgaaaacagacgcccggattctgatgtattaccacaggatgaacctaaagtaattccaaaaaatgaagatgacgaaaagaaaaagaaggatgatacagaccttcttaaagcccttttagataccactaaagccgggtttaagaaatcaatttcgttaactgacagaatttccagtatgctctttagctatactgtgacagctgttgctaatatggccaaaacagccgctatggttttagctttgattatggctattgatattatcaaaatccatttcaaatactggaccgaactgttcaaatcaaactttgaagagttcactaaattggccgggacttgggctcctatattaacgtcgattagtgaaatggctcaaagcattcaagatacttttaatgaaggttcttggactggattagcagaagctattgttaaaggcctggttaatgttttagatactttgggtgaaactattatgtttggcctttctaaattggtcgctgctgttcttagtaaagtccctggtatgggcgatactgcagataatatccgtggtgcagctgcagatcgtttccagtatcgtaccggagccgaactttctgaagaagaccaagattacgtagctaaatataaagataatcagcgcttgaaagaagagcaggattctccgatggaacgtaaaattactgcttggggcgacaggtatttactgggtaaaatcgatgatgccgaatacgaaaaacgtatgaaattagctgattctgatactaaagacccggcctttgaaggtaaaacccgtgaacagcgcttagaaatgtataaggcccaaggcaaaatgcaggctgaattaaaaagaacttctgaatatgctcagaacactcgacctgaaaatacagagcgtatggagtctgccgctaacgctgttgctaaagcttctaagaacttcgaagagttcaagaagaataatcctagtctagctaaggaactagagcctcaataccgctttatgcaggatgagtggaacaaaaaacgatttccgactgttagtccagaaccggcagaagacaagcaagaatcccagcaagttaaggttattgagaaaatcgaagcccagcataaagttggtgataaactagcttctcaagcttctgtgaatgttaacacagccattaacaaaaataacactactgttatgcctatgcagccggttactagttctccagctccaggtatggtcggatttacaaaatctaattaaggattctttatgtttttcgaagaattaaaagagggtctagagaatattaagaaatccggttctaagatttctcaaggcacgtctaagcatactttaaaaaatgctgccagcacagtgacagctcagtacccggcagaacgttctgccgggaacgattcaagtcaagacatgagagttcatgacttgtatcagaacgggcttttgtttactgcatatgattttaaatctcgtgtttctccggacctacgagatttccgaagcgctgttagtaagtcatccgtttttgatgcaccggaaaaaactaacacaggttcccagaatctttctaaagcccctgtagctaacatcctgttgcctagatctaaatctgatgtagattctgtatctcacaaatttaatgatgtaggagagtccctgatcacacgaggcgcaggctctgccacaggcgttttaagtaacgtggcttctaccgcggtatttggtggattagaatctctcactcaaggatggatggcagataaaggggaacagatctataatactgctcgtagtatgtacgctggtgcagaaaatagaactaaggtcttcacttgggatcttacaccaagaactcctcaagaccttattcaaattgttaagatctatgagatttttaactactattcttatggtgcaacaggaacatcagactttgctaaagaaattaaagaacaaatagatgagtggtataaaagcactttagagtacgctactccagaagggtcctctaaaaatgggactatgtttgaatctattacctctttccttactaatgtaatcgttgtaagcaacccgaccatttggacggttcgtaactttggatacactagttcttatgacgggagagaagatatattcgggccttgccaaattcaaagtcttaggttcgataaaactcctaatggtcacttcaatggtctggctattgctcctaacttgcctagcacttttacccttgaattaactatgagagaaatcttgactttgaaccgtagttctctatattctaaaggattccaatcgtaatgtatactttagatgaattcgtgacacaggctgctaatagtgattttcagagaactaatatgttctctgttatttttgctacagcaccatcgagtaaaactcagactctactaaatgaatttggtggggaactttataataacgtaggtcttaatgataactggcttggcttaacacaaggtgaatttacgagaggtgttacatctcttattactgccgggactcagagattggttagaaaatcgggcgtaagtaaatttttgataggagcaatgacccaacgcactatccaatctctgttaggggaattcactgtagggacttatctgcttgacttctttaatatggctttccctactacaggattattgatccattcggttcagattcctgaaaataggttagctcatgaaatggacacctttcataacagccctaacatcaaaatcactgggcgagaatatgccccgttggttataacatttcgtatggattcagaggccagtaatttccgtgctatgcaagattgggtaaacgcggttgaagaccctgtaacagggttaagagcattgccttctgatgttgaagctgatattcaagttaacttgcatgcccgtaatggtttacctcacacagtgtgtatgtacacaggatgcatccctgtgggcgtcagtgcacctcaatttagctatgaagataataatcagatagctacattcgaagtcaccttcgcttacagagttgcacagatcggcgctgtcggtaaacaagctgcattggattggttagaagataagactgttcagaagattgatactattaacccaaatctaagtgctcaaggattaggtagtatttcaagtagattaagccgtgttgcaggcgttgggaatggacttagtaagattttaacctaaaaaaagggagcctcacggctcccttaggggtttatttacggaaaccaaaaaacgcggtagaaacggcgattacaccggtttcatcggcaacctgaatttgtaccggagcttcagattcaagctggccagacataatgccagcaaaaatagtatctgtttggtccgggttagtaaagttctgcatcgggtcgaaagcgaagagtttatcgccatagattttctgcaactcttttactacaacttcactgaactgctctgaagcagggataacgtcatcgatagaagcttcgataccatttaaacggatgaatgaacgcattttgatttcctcatttgtatgtgtaagaagactataccacatccatatggtgttgtaaactagccttgtacaaatttttccggagtgtcttcaacatcaataaacgaagccaagatgccaaggatgttccgcttagtagtcaagaacgtagaagcactgatatctgtatcttcaccgtcaacagtaacgatagtaccagaacctaccggaactagttcaccggattctaccaagacgtcgccgtcataaactaccatagattcttcaatttggtctgaagtcataacctcagcctgaatgaatttttggttatcatgtactatgccgtcagaataagatgcatctacaatcttattaatttgaagcatagtccctcgcggcaagataacttccatttcaccagacatattacttaagtcgcctggataaacgacgttggttttatgaccaccttcaatagcccaaccgatcataactttattaagttcggcttgcttacggtcatcgacaacctcactttcaccattagtatctacctcggcgttaagccaactggccggtttaactgtttctgcactattgccagggttgtttaaaacagcccgagtattatctgaagtcattgctacagattgattacctttccagccgccaaaaataataggcatcaaagacgtagaaacgtagtttcggaaataaaataccctatttttaacaagagattcaaaaataggctgacgaacagtctgagagcgccataaagtaagtccttctggtaaacggtcacctttcttaaacgcatcgtcaagatttttaatagccgttgtaacttctttagcggttaatgtatcatagttgtcttctgtatatcttccaagaagcatattattgatatcagtgtacccagaacctacatattctctaattccacgcttttctgcaggagtatactgggcaggactgcgagtcattgtaattaactcaattcctgaagaaacatttttggcatacccttggagagccgctttgattagtttggtccgctcaatgttccaaagatttctggccatagcttcgcgttcaggctgttccaggtattctggagtacgagtcataatgtgctccatggcttcgtattcacgttcagctaaagcatctaaaagagtctgagcataagcctgcatgctcttaacagaagttaacggtgcatcaccgattcttttaataagctctttagagaaatagtcttcaaactggggccgttcacttagtttaatcgtaatcaaagagcttaattggaaagctgcgccttctgccgctaatttggcggattgggctctagaagctttagaactaacagagtctaatatttgggccgcttcaggaatttcctgagcagtactaggcttaatgaattctatagcagaagcttcatattcttcaaacttagaagggtccatgatcacatctgtagaaagagcttggctagctgcaacttgtcgacgagaaattttagtacgacgaataactgcgatatctgtacgagttttctctacctcggcaatagagccggcgatagcttcatctttagtaacttgaacaccgtctttcttggatacccatacatcgcctacagcagaatcaactttagtatatagctcagtattgataccaggaatcccagagatgtcctctaagggcttatttttacggtaaataagaatatatgtatgtttaccggtaaagttatagagcgcatccaggactttaaatttaccaccagtacgggccatacacaggcgagcaatcagacgctggagaacagggccttgacctttcattttcttggtcgggaaccggaacattacagcatccatacggagagcttttacctgttcataaaccgtatcaaagatcgtattaatcgccccgattggattactacccaagccacctttaagctcggctggggcccctttagcactaagcgacatcaaaattacatgagcgtatttgtcacccattttaacttgtttaatagcatcgccttcagattggtatgataccattctagctactaagttttcatttccaggtactttaatagcccagatctgcggtactttagatttcaaattcaagttcacgacaggatagttcttatcgctatcagagtcgaaaacttcgttaagttgttcagacatagttattccccttataagatactactatttatgccaaaaaggagcccgaaggctccttaattagaatggccaatcaccaaacacttcttcaaaggtatcagctttttctttgtcaaatcgccagcctttaataattggcaagaacacgcctacagttccgtctttacggcctttagaagtcgtccaaccgttacattcacaatcggcaatacggtcaattaacttaccagcaatagcatcttgcatcagagattcacggtcaagttcgccacgttggtcgataggaatcagaatccattcaccgtcaattttcttatgagttgtatctgtgaaacctgaaccgcagtcagtagtaatacgtccacattcagaagctaggttaacaccaccaattttattcggatctttagagtgagcatagtacccagtaactcgtaaagcaatatctattactgctttgaacttgaactggttcttagagcgagcatcttcccacagaccatccatgttcttaagaatgatgccttctagaccctggtcacgatatttctggtaaacggcccgagcttcttcaaggctattaacccaatggttttcaataagaataatctgactgaaaccttcagccataagttctaatgcacggaaacgtacatcgtacttaaagctcttgagtttaccttcagaataaattacatccagaggaacgtaatcccagacctggaatttcataccttcagcttcttcaggagtaattgtgcccttcagagatttgtttgctaacccatttgaagtgctgcgatcaacaacagtttcttcttgttcttcaacaacatcgccgaacaggaagtccagagaatctttctctttgaaattggctggagcatgataaactagctcaccatcaatcattacaccaccagggtgtttctcgcgggcttctttagtcatttccattagctgttcagccaatttatcaagacctagataattgttaccggaacgagaaaagaacagaacaccgtcatcacgtacttcagcaaaacaacgagcaccatcagcctttagctgggcatacgccggaaacttaatatgctttttaattttggcttcgtcaaaagatgaagccaacatctgtgggtactcaggaatgaggtttttccaggttttattagcaatcgttgtacctgtgccacattcaaggtcccgcatcagaacacggcgtaaaacttctataatttccggagaaccatctgcgatatacgaggctaactcagcaatggccgcattacctgttacctttctaggagctaaagtaaactctgcgaaatccaagcaatcttctagagttaaaaggcctgcagcttgtgtaggttcaccggcctgtggccattttttgataccgtagttcaaccggcgagaatacgccattctgaatacacgcttcagaagttcattattcttttcgcgattcataatcgctttcttttcgttggttgaatccgtagcagcaagttcgttaaggatgtctaaaatcatttaattcgccttccgttataagtagtcttattataagctacttcatccagaagcagatctagcttcttatggtaagtaatcatagccctccggccattaaatgtatcgcagaggtattcgcttatataaatgaacccttgttcaacgcactgtttaaagatttcttcatctttagcttgcctgaacagaggattttcgcgaaagaacatattaacgtgaccgaagtcacgtgtgctatggtttccatcaataagagtgtgaactacaaacatagttacctcagaaggttgctcttaaagcagacggacttttagcagtccatctgtccctgcaattgatgtacggctctggagtaaatgggatgaatgggcgtaaaggtgtttgggcccaaggcttatttttattagcttcttgggctttacggattacttcccaaatggcctcttcatgacttttacgggtcccaggagtacctgatattttctgaagagtagccaggttcccagtatcagaagaacgcttagaaatcatatactgaacttcggcccagtctttaacaaaataagcgccagttttctcggccctttcgccgcgaggcataaagaacacatcgacatctgttcctttaaataccttcatggcagcttcacagtgagaaggcagatcatcgatataacaaacaatccgagatccatatttttctttagcctgggaaagaagggcatccttagactctgaatggccacacatcaggatttcctggaatgcgccagggaacaaagaattcagattgaactgtctattcagcttggcatcaatactgttgcctagcgcagttatagctacaaattcgtagtctttcttgaggtcattgatgaccttcagggcatctttatacgcggcaaggtaccgaataaaatcagagttattgtacttttccataagctgctttccagtagcaaggtcagtttggaaaatatctgaagcgcaccggaatttttcgtctgaaatcatttcaataatgacgtcagttttgataccatatttgtgtgcaaaataagccaggcctgattgccactggatgaccacaccatcgatatcagtaagaataaccttcttcattagttaaatctcttagtttagatattttaaaaagctcgctttcagcgtgcagtgaagtattaccgtcaacccagtttacattataccatggttcgatgtggtactgtggaattgcttctaaacaatagataacaacacccgggataccagagaggcctaatgagactgtatcatgtcttctaaagcgcatagaagtcctttaatttttcaaagtctacagatgactcgaagtccgttataacgatgtaatttccttgttcgagtcgtttcttcagaacttccatatagaagcctgatttaggcaacccagccgagattagatggatttcgccttgtttaaacccattagctacttgaatcattgcactgtaacccagttaggaaattcaaagaaccctggagcatctacgtaataaaccactttattactttcaacttcacagctaataacttcgatcatttcattgttcatcaagcaacgagccagacgcggagcttgggctttaggaacagaaacacgcataatattttcctcagaacttagttttgaatttattaggctctttaggcataacggcgttatcgccgttgtcgtcagaataacctacaggacgatctgtaactaatttttccagacgtgcgttgatatagttgatttgcaaagagtcagcgccgttgataagacgaaactctacagggcagtacttatcgatgtacttacgaacggcatcaacagtaggtactttgccatcgaaggtatcgctgatgatagtttcgatgcctttacgtttttcgttccagaagcttgatacgatcatttaaatttcacctctacagatgcagtagcttcgattttcagaacctgaacaactacttcaggaacagcattaagagcttggcgttcagcgaactcataagcatctttagaagtcaaaggacctaaaatagctttggagtctttgttaacggtaagaacgtagtaatcgctttcttccgtagaaggagccactacgggatctgtctcaatcaaatggaaacccggaatagccttattgtacgcagtatctaagaaaatacaccagtaatcagaaagctcaccttcataggcttgaaggactttgccgccagggatttcgatagctagaatgttaccaccttcatcagaagacaaaaccttgaatggtaaattggtaggattacactcaacaaaaacttcagctattttactataacggcttaagtattcgttgaacttctctgtagacagtttaaatgttttgccagtaacgttcatagtaatttcctcaaagatggggccgaagccccgttcgattaaattgtgaattcgcttgaaacgatatcccagattgcttcacgttgttcttcagtagttcttaaaccgaggacatggcgcagataaagcttaactaaggttttgcgattatctccgtgccatgagggatgtgtagcaaagttgcgaacacgaacatcatcatgaaaaccaactttaatcatggaaccttccaatttaatatctagagtagggccattctcaaagctgatgaaaacgtagttatcttcccaatacatatcgatctgagctacaacaccgttattatgtttccataagcagataggcgattgatcgaaatcatgaacatatttgcgttcgaagttggtgaagttcattattttatcctcatttgttggtgtaagagtactataccatactcctacaccaatgtaaacacttagtactgaactttatctactacaatttctttctttgcagtaaacgatgaaatctttttgatgaccatggcttcagcgttttcgttgtcacgaacgtagagagctgcaacttcttctgcacgttctagagtcatatcgtgcgcacgaatcaagaatccgttaccattatcagaagtcattacacagaacttttcaaccggagcaggaaccttaacgaccagtgtaccgatttcatcactagtaaacagagcttcagcgtattcgtcaattccgaactcagggtattctttacgaaggcgtttagcgttatagtgttcaccttcaactttgatacctatgactgtaccgttaggctttgtttcggtgaagctaaaagttttaccattcagcaatttagccagggcattatcgatttcccagctgctgagttcaaatttctgacgagcgtcttctgatgcgaatttatagagttccattttagttccttatttaacttcgattacggtggtaacaacaggctttgcggtgccatggaatttatacagctcgtatgtggtttcgaccggagcaatcaaacagagttctgcaaccagttgttttgcttcttcaagagtgaaagcacactgtttgcctcgataagcaatagaagcccgttcaaagtttttagaacgttctaaaactagatacagcggctcaacttctacctggaccggtttacgttcaatgtgccgctcaacggtgccgacatcaagctcaccacaagtgaacatcacatatgattgctcgcgacctttgatatcagcacagttaaggtctttgggggcaatgactcgcccggtgtcggccatttcaatagcttgaacacaaccacttgaatcaagagaaactggaaaccaaggacgattaccaatttcacgggccaggcagtaattcaaccctttatggacgctttcggagaaacgcttgactgcttcatcagaaagtttgtaagctacgtctagttcataattacgcatttctatttcctcaattaaggggccgtagccccattaaaattaaccgataaaggtccaatgagttaaatcaataacacctttagctttcattttttcgatcagatcatcagccacttggcggccgtttttgtagtacgttacatcttctgagtagccgtcttcttcatcttcgtaagtctcggaaacaattttaccgacgatgatagttttcagaacatactcttcacctgtgaagaagttagtcaaacgaattttccatgagaaatcgtctgaagggccttcaggagtcatacagtagaccagttcgaattgctctttggtaagcatccactgggcttcatgaactacctgggctttatagccgtcatggtctttgcacttaacagtagcattcagattgattttcattttattctccagtttgttggtgtaagtactataccacaacctaaagatgatgtaaacactgctactaaaaacaaaaaagggactcccgtaggagtccctgaacttatgccttcggcttaccaaaacgagaagcatcatcgcgaagaaccgcacgagcacgacgcatgattttctcaaccgtctgattgatacgcttgttcgacgcacgcttgtagccagcgcgtttagaggcaccaacaacttcttttactgcagtttttgcttttgcttttacttgtttagccattataaagtcttccattttggagaaatacatgggagcacgttcttccgaggttcaacttctttcgacagttctttcggttgtagctcccgcaagccctcaaaggggtacgatttaaactcttatctgttgcacaccgttagcttaaaggttccgggtccgatttatcggggataagatatacaccgatggatgtataggccttgaggcgtactcccgattggccatcgcctcggggtagcatgcacttgccgtttattttctagctgcactttggtagcaaatcaccgttggtttcgggtgttttacgtggggataaccaacaacgtccacatcatacgttacccatgcgtacacatggtgggcgtacaaattacttcagcgttaccacaaagtggcgaacagctttatgagccttagcacacagaggcttagcatatttcagttcatctttagcagctagttcagcttcaagagctttctgagccggattcagacgtttgaaataaccgagcagatcaagcattgctgcttcgacgtcgatggaggcaccgtagttctcgtggccgttgttccaggattgacgctggatgtcaagtacaaatttgatagtatctttcattatagaacctcaagtgaggtgaataaaaggtggagccttaagacccatttggcttaacgcatctccaccgcatagaagagtcatctcttcatacttttatttatatcacttataaacacatgtcaaatttttatagtgtacagtgacgaatttctgcttaatatctttagctttagctataccagcagcaaccaaaggatgagtcacatgtttaatactacctaaaggagtaggggtcagatcaccgacttcaacgaaacctttgggaacatcttcaccaatagaatagatttcacacagttcaggaacttcgccttgagcacggcgttgttcaatgataataccaccagcagaaacttctggctcaccagcctgagcaggttcagacactaaaataacatactcaccaagagcacgaattggtaaatcagtcatagttatctcttttgttgttaggacagaataataatatcaaaacattcttaaagcatataacagattagccaacaaattggagtaaatgttctgctttcataccgttaacagagatcagtttgtcgatgctgaatccacgccattgttttaattcggtatcaaacagaggaaccatatcggtggattctttacgaggcttagaaggattcacataactttcatagatctcggcaccaactagagaagaaaccacctctttatcacgggtacctttcatagtgcgaatagtgccgtctgctttttcgaaaactatatctgatacacccatagatagtttgactttcagaacttcacgcagagcaattttttggtcagtagttaatttcatacttctaccttaataaagttaaagcgaacagtgtatgcaggtttaccttcaatttcagtaaagtcttttacttcacgcagataaactacatccggattaaatttcacgacctcagaaaccagatggtctaagtcttgggccttgaaagatgcaatatcaactttgtaacgctcaccacgttttatagtttgtacagaaaatgaaggagagtctataacaattactttaataccagcggctttaagcataaacgcaaatttttcagttgcatctacaggttccggcataggtgggttgatgcttacgatagaatcaaactcattaagattcattattcaccacaaaaattacgaatctgttcccagttcagagaattaagattcttacggttgtattcaataacttcaattccggcttcaaccagaatatcggcccagtcatcaggagagcgatcataacgctctgcataaacaacctttttaatacctgactgagaaatagctttagtacaatcagggcaaggagacgcagtgcaatacagcgtagagccttcaattgaagaacctttacgggccgcgaacaaaatagcgttcagttcggcgtggatttcatttttagaagaccattcactatgtgccggtctgtgttctttagccagaacaacttgtccacctttgcctgaaattcggccagacccagaattaggaataaacttggtccaaccttgctgtgcggcatggtcacaacagttagttccaccagccggagaaccgttatacccggtagaaatgatgcgaccatctttttcgataaccgcacctactttccaagagcagcattttgattcttgggaaatcaggtatgcgatttgaagataggtagatgctttcatttttaacctttgttattcagattacggagaaccatttcagtggtttcccagccaatacacgggtcagtaattgacacgccatattcaaggtctgtagaaatcttttgattaccttgtttaagattagattctaacataattcctcgaacgttagccaattctgctgcttcagcacaaactgcgatctgattcaagaaagaaccctgggcattagcatgagagcaatcaaccattagatattggttaacccctgccttctgggcctgagagatagcatcaaagactgattctttatcgtagttagttccttcagaaccgccacgaagaacaatatgagtgctcttgttacctggtgctgagacaataccaaccacgccattttgatccatacccatatagtggtgtgggaacgcggccgattgcatagcgtcagtagcaaccttaacagaaccgtttgttccattcttaaagcctacagtcattggcagacctgaagcaatttcacgatgagtctgagattcggtagtacgagcaccgatagcgacccaagagaaaatacctgacagatattttatagtgaatgggtcaagaacttctgttgccagcggtaggcccattcgcaaaagcttgcgacataaggtgcgagcaatacccagcccagtattgatttcaaatgaaccgtctaagaacggatcattgataagacctttccaaccgacagttgtacgaggtttttcaaaataaacccgcatacaaagcagaagattaggaagttctttttggagttcagccaggcgctcaccgtaatcaacggcagcaactacgtcatggattgaacaaggccctactacaaccagacggcgtttatcgcggccggtcataatcttatcgatttcttggcggtgtaaactgacttgattttgcagctctggagaaatcctacagcggcgctcaagttcagctgggcttatcattctttcaattaaaggtctcatattgttccttacttacattattctccaataagggccgaagcccttagaaagcatatactgaggtagattgaatatgactattaggcaatagttcaatcaagtagtactctgacttgaaacctttaacggtaaatagataagacgcgggtgtttcctgcgtcacatttagctttgcgcttgggttacgttcagatatcttattaatcaaagattgagcaaatttaggaattaactcggcaaactctgaagctgtgaaggtcttatcactgtacataaacattaacctcttgggtaccgaaaatgcctgttacttcaacagtgaatccaccgccgccttcaaagacaatttctacgactgcttgaacgccaaggctatttacttctagggatactttgccatggttcggaataagcgtattaatagcacttgtgaaatccgcatgcattttagctttcaaggcgttgtcaagagtatcagcacagtaattaccaacaacctgcaaggcaacaactttaactacttcagaatatttagggaacatagcttttccttaatgaacggtgtgtactttaacattaacaacgaaatgcgtattaacatcagaaagaggcaaaaactcaacgtggtactcatctttgtaacgagtattcaggtctgtacgaatacgcgccagttcattaatcaaagctggggttatgctcattccaacacatttccgaagcattttgtaagcttcttcttcaacttcatgatgcttattgtacatatcattttcctcaagtacaagtagactggaagtacatcatatcatgccttccagccgttgtaaactaccacttaactcggattgaatcgataagaccatagcgattaccgccttgatagaaaacctctacttcgtacccgagttcttcaaactggcgaatgatatcagccattttatgatgctggtcttcgtattctgtacgacgtcctacgataccaaaatcggcaaaagggcagaagctggctgaaaagccaccgttaatagctcgacgagcaatatgctcaaagacatcattaggaatagtagtattacgttctgtaaaggctacagagagccttactgcatcacttgctttcatcaaaagttaccgaaattgacttgccaacactcaacaccaatacggcgccacatttctacgacttgatctcggtcgtcgacagccagcttcacatcgaaatgaggagctattttgttccagaagatttcttctttcacaatcatatcacttctcgaatcgccttgttcacgctgacagtgcattaccgcaggaatacccatgtcttcaacccaacgacgggtcatgtagtagtatttcataggctcttcaatagtaccagattcgcgtccgcttacgacgataatatggtagccttgtttagcgtacatctgagataattctacaaccatcgggttgataacatcagtgtcgcatttctcaaggtcatacggagaccgtccgaccattttagccagtgtaccgtcaacatcaaaaataacggctttcggtttacctggagtaccgttataaacaggcttcttctgatattcacagaatttccagaacatttgacgcagaatatcaataggaacagccctgtctccacgatactggttacgcttcagcagttcaggccaaggcacatcgaatacttgatacttaatagtccagttatattcagcagcaaattcaacccagcggcgacgcgtatcagggttcaagttcgtgtcggagataatcacacctttaacagaatcaccaccgtacaagatagtacgggcagtttccatctgcattgaagttacaatgccttcacgcttcttcgagtacttgtattcattacgagcttcaagagccataatggatgcgcggtagtcgtcacggttaatattgaaataaccggggttcttttcaatgtactgtcgggcccaagtacttttacctgaaccaggacagccgatagtcaaaataatggttttcattgttctaattctctaaacatatttttaataatggtcttttgtgcatcaataagagataaatgccttttctcgcattcttgagaacatcctttctctaccagatcacacagtgtaagccataatttatcatacctgttaagagcaagtaagaactggcgcatattctctgtcatttcactaacccgtttaaaaaggtatgcaatttattagatgcttcggtccaagcctgatgcttatcggttcgatatttctttaaagccgggaaccgagaatattcatcgttcagatcatgacgctcgcaagctcggccgtaaataagacatttcatttcaacttcggaaataagaccgcgtagttcttcaagttgttctttagtcattaaaagagttcctcgtacagggcttcacgagcatttttcaagattttaccggattcacggagataagattctacatcagaaatgaaaccattcgctactgctgctttacgctgaccgtgctgaatagcggcttcttcaaagcgtttaactacatcttgaacacgttcgcgttctacggcgtcttcataaaactgtttgtaatcgaatacaggatgcatcatagcacaccacttagataagcggatataagtctgaggattcagatcatagacacgagacacgtaatcttgacctggggcatagtacatcactttagtgacataattaatgccgtcgatatttttccattcataattgaaggttgctttcttttcaagaggagtaagagcgcaagaaccaatcatcatgattttgcggagtgaagcgtcttttacgttagacaaatagctcggcttgcctacgaaagagttcgtacgaagagacataacaagttcctcaaaaatttttatcatccaagtgaggccgaagcctcactgacatttcggctcttttaacggagcacgataataacatatcacgttattagactgttgtacataccgaagaatgtcgttagtccagatacggaaatcttggaactcgacgaatggcattcccacccacttctgtccatcaatctcatgtacctgccattcggcttggtattctttaatcggatccggccaagtagcatcaaccctcggtgcaggtttcacttcaggaatcgcctgagagcatcctaccagagcaagagataaacatacagctgatatcattcttttcatctggtcgcttcctggagctctctggcgaactcattaaatggatcgtttactatttcttttaccgctttagggtctactaattcagcttcacgctttttattagcagtcaaggttttatcttttgcattacgagcatcgatagcagccttgttcttttcagtaagagcttgaataccttgcagttgggtagcaataagatcaatctgcagctgctgggcttttgctacaccctcgatctgagctacttgttctttgagcgtatctacacgataactcagatactttgtagtacctaatagacctgcaattagtaggccgactataatgtaaatttttagtttagacataactttttgattacctcaacaatctcatcacgagacaagttgttgacgagaatatgcttaggagctttgtctacctggattttatagccgtcgagttcaagggccatatcttcgctggttttatacaaatgcttaatacctaagcgattaaacttgtcagaaagagggtcacaaataatatagcatttatgaccattcaggtgaacattaggctgggtgatattgattttcacttcagctccgtacttagtcaactgattttcaagaaatgaatgcatttcttctacggccgccggcattgcttctcggcgttcttcggcttgcttagttgaatactgtttttgcttaaactttgtagccagttttcgacccatggtaacgcgcaagtccgtaatgaatccaagtttcttttggcctttatagacatagatcccgtcatgagaagtaccttcgaagtgagcaacaacgtcatcattagaaatgttttgtaagttcattttgggtcctcgtttgttggtatacgggtatcataacacgaacaaacgaggttgtaaactactcttcaatcattttgatttctttactataaagagcaggcacgtattttggccagactttcagaaacgccttttcaatacctttaaccatagcttcagaggtcatagtgcctgcgtacatctgcatcataaggttgaacagttcaggcttaccatttttggtagctgtttcttggcctttgatggcatagtctttacgatcgcgtcctcgcattgcgttatagtaaccttggacttctagcagtgcactagacaaatactggatgtactcgctttcaaatgctgcgattttagaaacggcataagtatcaccatcaaacatagcgcgaaggtcatcggcagcaccacctacgattgcttcatataaacgttcattagaagtaatcgagtctttagtatggtgaagcagacagtaccaatcagttttaagcttgaaccgttggccactttcaagaacagcaatatagccttcgataccttctgctttgcgggtttctttgacccaagcttcgccgtcatcaactacgtgagaaggaatcagatattggcgcagaacagcatcggcataaaggtcagcataaggaacatactcgccggtatcgttatgacgcacgttcagcaggaagatagttggctcttcatagtataaaacaacacggttatttggggccgcgtattctaagttaaacgtatagcctttaggtgccagttcttccattttaagatacaaaggaaggtacttatcttggtacaacagacgttctgcagcaaaagcctgctctgaagtagtagacgttttagatttcacaagaactttatcgccttcgcaataagtcgaaatcaaagaaccatcggccttatccataacgtattggattttagaaagatctaagttcatcgtcaatggattttcgttcagattaaagaacttttccatagggcgagaggcaatgcggacagggccgttgtcatccatctcgaacataatgccacgggcttccagggcgtcgtctaagagccaatcactgtaggatgcatagtgataactaaatatgcggaacttagtcccgtaacgtcctgtaacgtctttataaaagaacttagaagcttcagtcttatcacagaccgccatgagattgtcatataattcgatcatttctttatcctgtgttgggtattccaaggtggattgaactttttgatgaacataggttcctcaagatccatagtcgaaatcgacatctcaccaagttcattgttaatgagtaggttgaaacactgccgtgcatagaattcaacctttttaccggatattaatgcatcaaaaattttagcagatttgacagaatccgagttcgtgtctcgcctgttaatcgatgtccggtaataattgatacgtttgcgaagattcttagttttacctatgtagactagttcatcatcgactgctatggcgtatactacattaaatttgtttggtacctccagctgctttatagtgcagtctgattcatctagttctagactaacatacttaatgaagctaaattcatctgcgatttctttcatataacaaaggggccgaagcccctatccttataaagatttgcgaattctggccagtacttcagaatccacatcgttatcgatttgggctacaagataagaagagatttctacttcttgcggggcagattgtactgtatcactatttaagtattcgcgaatccatggaataggatggtgagtactttcaagaatgatagagcatggcagcccgacagccttcatacgagaaacagtaagataatcaataaacttgtgcaagatttcaacgttcagaccaggaagaccgccagcgcggaaaagatggatagcccagtctttttcctgctgattaacttccataaagatacgaacagcttcttcttcgcattcttttgctacttggacccactcgtcgccatcagtaccaagttgccattgacgaatctggtactgagttcctttaagatggagttgttcatcacgggcgatgaacttcataatcttagcgttgccttccatgatttccatgttcttatggaagttgaaagtacaagcaaaagaaacatagaagcgaatagcttcaagagcgttcactacatgcatgcaaagatacattgctttcatcagatcatgtttagcttgtttgacctcgatgttgtctggattaaagcaacgttcttgagcattctggtaccgacgatgggcttcagtaaccgcatcatagtaaacaccgattgatttggcacgtttcatgatggcttcgtcaagaacaatttcttcgaagactttagccggatcagtgaacaagttacgcataatatgcgtataagaacgagagtgaattgtttcactgaatgtccaggtctggaaccaagtatctaggcttggatcagaaatcagcggagcaaatactgctgaaggtgcacggccttgaattgaatcaagaagactttgatatttcaggttatctgtaaacaggttctgttggtgttctggcagcttttcaaattgccctcggtccatcattaggttgacttcttctggacgccagaaaaatgataactgcttttcaatgaggtcttcaaaaaccttatgtcgctgctggtcataacgcgcaatacctagtcctgaaccaaggaacatcggttcggtcatgatatctacttgtttggtgttaaaaactgtggtcataaagtgtaagtcctgttaagtaattctggtgtaagtatcatggatttggcttggcgttcaaattcttcttccaattccctgaatctacctctgattctttctttatcttcttcagtgaatttgaagtccttggagagctcaatcaaatcttgtatagtcataaatcctcctggaccatccgtggtccaattataaactgaagaaattaaagcttacatgctgcgcaatcgtccgctttcggttgttcaatttcgtaatcatctgtaccagacccatcacgagtattatgatagtatgcggtttttccacctaatgaccagaaatacaacatatcacgaatcatcacagacataggaaccttgcctttagggaacactgctgggtcgtaactaaagttggtagaaatactttgacaaacaaacttctgcataatagcagcttgtgtcaagtaacctttcataccacgtttggtcatacgccacagataatcgtacaaatcgatgttatgttcgatattcggtacgacctggttaaatgaaccttctttagattctttaacacttaccgggccccgcggaggctcaataccgttagtagagttggatacctggctagatgattcacacggcattagtgcagaaagggtgctgttacgaataccgtacttaaccaggtcttcccgcaacgacgtccagtcacaaacatagttcggtgccacaacggtgtcaacacgtttgttgtaccagtcaattggcagttcgccacgggaccagcgagtttcttcgaaataatcgcagcgacctttttctttggccagtttaactgatgctgtaataagtccgaattgaagacgttcaaatagttcatgagttaagtcattcgcatcatcataagtagcaaagttagaagcaaggaacccagcatagttagttacaccaatacctaatgcacgacgctttttagctttcagagcctgatgaacaggataattctggtaatctaaaagattgtcaagtgcacgaaccatgatttcagccagagtattcacttcatcttggtcttggtaatcaaagttatctaatacaaatgcggccagagtacacaaggctatttctgggtcatcgccgccaacgtctttagtaggcaatgcaatttcacagcaaaggttgctctgcttaacaggagcaatctcgggaataaacggaccatgcttattaacgttatcgttaaagaacggatagatccttgctgtaccagcacgttctgtaaagaacagttcccacagttcaagagccttgatgcgtttcttacgaaccgctgggttcttttctagcgactcgtacagttgtttgaatttttctgggtcgccgaagtaagaagtgtacagttcaccgtttgcaatatctggactaaacagagtaatgtaatcatcgttcagaagacgttcaatcatcaggtcaccgatctgaagaccatagtccatatgacggattcggttttcatcgatacctttattgttcttcagaacaagcaggttttcaacttctaagtgccacatcggatagtacatagtagctgcgccgccgcgaacgccgccctgagaacaggatttcactgcagtctggaagtgtttccagaacggaataacaccggtgtgttttacttcgcctgcaccgatcttagaaccttcagcacgaatcataccaccgttaatgccaataccagcacgtttagaaatatacttgatgattgagttcgctgcttcattaatgctatctaaagaatcacctgcttcaataaccacacaagaactaaactgccgcgtcggagtacgaacaccggccataattggggttggcaaagagatctggcgtttacttaccgcatgataaaaacgaacaacgtgcagcaagcgatcagtaggttcatcttgatgcagacacatgccgatcagcataaaagcaaactgaggcgtttcatagattacacctgtactacggttcttaacgagatatttctctttaagctgcatagtccctgcataagtcagttcgaaatctcggttgtggtcgataatggtgtcaagataaccgatctcttctgctgagtacttagacaagatttccgcgtcatatagaccttcgttaacaacacgagtgatatgatcaatgaacgcaggaggctcgaactgaccgtatacgtctttgcggagcgcaaacatagccagattagaagcaacatattgatagtccggttcattaatagagatactgttagcagcaactttaacacaggcgatttggatatcgcgagtactcatgttgtcaacaatataaggcttaattcgctcgtacaattcgtacgggtctactgaagtattagccgtagcccaagtaagcacttggataattttatttggggtgaaaacttggctgcagccactggattttactacgttcatagatcctctatagtgaattcatctttgaataatttgttaaccacccgagcaattatatcaccatgacatggcttaggtttacatgtgcatcctagacgcattccacgtaaagtctcaaggtgttcctttttgattactccggttctgagtttattataaaactctttcttaaatgcaagaatggcagcctcacgactgccagcattcttacctacctcgttcccccacatggtgcctcgatgaatgtttacatcaaagtcggagtggtatttattcactacacggcatgtcttcatgtgatatcaacttcaaaccagcaaattaattcacctttacctgaccattcatacgatttaataacggacaaaaccctttgttcagttttatcaaaaactacagtatcgttaatctcaggtagctcaataggagacgcatcaaacatttcgcctaatatagttttagattggtgcctattacggacaaatcggatattcattcacaggcccttaatgcagcttctagaacttcgattaaagaacgagcatggtctttatcaatttcaaaaccaagcccaggcgtattcatcttaagacgaattctgttacagtaattaggataaaccactgcttggattttctcccagtggttatctgtaacgaattctatcttaacctggtgaagcttatcaccagtgttagagtctattcgtttaatcatactgccatcttagctgtgatagctgggtgacttttgtacccatgaagtttgaagtctttatgagacatagatccagtgacccaatccaattgagtctctgtcggccagttttcaaaattactaggccaggtaatttctaagttacaaagttctttaggttcgcgcctcagaacttcttcacactgttccatatggttcgtatagatgtgcgtattgccgcctgagaacacgagatcgccaggaataagattacacatcttagcaacaatatgcacaagagcggcgtaagaggcaatattaaacggcaaacctaagaacacgtcaacagaacgttgataccactgtaggtctaggtacccattacgaacgttgaattgataaaaacagtggcatggtggaagtgccatcttatcaatttcagccgggttccaagcagaaacaatttgccgacgatctgtgggcatctgcttaatacgatcaatgattaatttcaactggtcaataccgccaaaatcacgccattgcttaccataaactgggcctaaagcaccgtccatataacctagttgacgagcctgagtctcgtagttctcgtcccaaatagttttaccttcatctcgagaaccgtgtgtacgttcacgaagatcatcaacattagtagagcctgacaagaaccaaagaagctcagagatacaagctttccaagccagttttttagttgttactgccgggaacccacgagttaaatcgaatcgaatcttcgtgccgaagacggcacgtgtcccagttccggtacgatcatcagtgtcataaccgtcagtaagaatgtgtttaattagatcttggtattgtttcattagtccatccaggaataagaagattcataacgaggatattttggcttatatcctagcttaatcatttgttttgcttttttagtgaatccgagggaacgttcacctttatcttgttgacgtggagtcatcggcccttgatgcatctgccgacaaataaaaagtgccattgcactaggtacatcgttaactttaagtttattgctcattattttactctgcacatggtttaaaattaatttctgagccctgtttaacgaaccgtccggtaatagagaacttagacccattatactgcagaattttattagcaattaataccagagtgaatcgggtattcatcagaacagaaataactacatcaggcgccagcctgacacggataccttcgtcacggctccagatagcattagggtctagttcgaactcaagctgataaagaccgtgctcgattgtattatatttgccagggttacgtttatattgctctatagtaggagcattaccttcaataaccaaggcccagttcttttggaccttatcagcttcaagtaaagtcagtttcatatgatttctcgtgttcaggagaaaaatacagcttagagccgtgtttaacaaatctaccgtagatagatgcttcaccgtttttaacttcaatgtttttaagctcgactgctttaagccactgctcaattttgtaagttagggtaaatgacggggcccctttgatttgccgaacagttgtttctgttccgtatgcagaagaaagctcttctagaggaactttaagtttatagatgccatgcttcatattaaagcgttgccactttttctggataacatcttctttaactagaaaaattttagccacggaattcaccatacacagattctgtaatttgagtcatctcatcacactggtaccagtgagattctttaagcatacgagtcattggaagtgtattcaagaactcttgagtcatctgaacggttgagttcacgcgatgcttcttaataatgctagtatgtacaaccagatcagcgtgagggaccgcctgctcaattaaacctttaccgccgatgatacttacatcgtaagtgttccggtccactatagtgtcccagggataatctgaggtggccgtagaagtaacaataatctcgccttctaaaaagcaagcgaactcatctggatacataatttcatcaggcgaagtaccatttttagttttaggtttaccacgaccagggctaataactactacagaacgacgccctggtaaaggagcatttagagattcccaggttttagcccccataatcagtacagtatttttagtacgattacggaagttaaccatatcctggcggatatgaccccaaggcaatccgtcatctaacccaaaagcaatttcagtattgccgtctacagttttggttgcgcacgtagcgaatacgacctgtaacattagccttgcctcattccacatttaaaacaacggccgcctaattgccatagaccgccaccacaatacttacactcccaatcagttaaaatcttcatttcttcgccttagcaagtttgaatgctgctttgaaagcaggaacatcatcaatatcaatccaaaagccagaaccgaacccatcttcgtagctcgggcacccatcacagtagtcgttccaagtacgtgactcaccacccatagtgaacccagtatccatttcacatagagcttcttcaacgcgttctaattcttcaggattgttgtcataaatgcagaactgccattttccgcgatattcagaacctaatttaatgctttcgcgttgaagtttcattttattctccttgttggtgtaggaacatagtaacatgaacctacacctctgtaaacattaattttcgatagtgctcaaatagtacagtgtatcttccttacccatacccatgcagtactcattttctatgaagttggcgacatcggcagctgatcctgaaattgtgacttccgaacatccaggatgattagtaattttgtcaatagcaatgttgtcgataactacgttgaatgattcgactatctctttcagatattcaacatctaatacgtcaatagttactttagccatgtttaactcccagtttgtttgtgtgtgagtactatactacacattaaaaccaatgtaaacccttaatgtaacttttacttttcataggcccaggatgcaaaaaagggagaccgaagtctcccgataagtattacagaccagctaacagatcgtccagatcaccgtcatcatcagaagacgaagtgttcagtggagcagattgctgtttaggtttagagtcaaaagccgccatatcggcatcaaaagcatcaagatcgtcactgagcttatcagcttgtgctgctgcggtaccagcaaccagagcagtacccatgatttgtacgaatttagcacggtttacatcgtaagacttaaatttgtctttggctacgatgtcattcagctgaaccataccttcatcaagctctttctggtaggcttcatcattgatgttaggaatttcagactgggcaccaaacttacagtcgtcatagttagtgaaaccaccaactttcttaactttcaggctgaagttcttaccttcaaacgggcaagtcacatcaaccggaacttcaccaagatcagtatcaacttcgatctcagcgttgattttgtccatgattttctggccgaaacggtatttgaataccttaccttcattttctggagcagccggatctttaagaaccagaatgttggcccaataagaagatttgcgtttcagcagtttatattcttctgggttggtgttatacgagtcattagagctcaggtgttgacagactgggcaagaatcataatcaccgtaggtagaagtacagttttcgatgtaccatttaccatttttcttgaagccgtggttaatcagtttgacgaacggaagtccttcgtcacctttaccaggaaggaagcgaattactgcagagccgttaccggtattatcggtcttcagtttccattcacctttatcatcggaagagaaagaagaaccacctttcagagaggccagttgagcttgaagttctgcaggatttttacgtttgaacatttaatatacctttttaatttaacagttatttacgattggtgatgcaacatgagtccttgcacctggacaagatttacattatatcttacatttatttatagcatcaataaagagctttttagcatctttaccatcgacttcaagcaattttctataagctttgagcttagtagaatatgtttcccaaactaagttgttggtagctgaatcatgcttatttattatatctagaaacgaatcaagcataataaacgtctcgaatgaaataacattcgactgaaggagcttaaagatatagctcgtttgtaccttttcattatattcaaagatctctgaaagcgcattcacttcaactttcttagcgaaatagtaaatgttctttacatcatcttcaaatgtatttttaatcatcttcaacttaccgatatattcacggtaaaagacgagggcgtcagcatcactgatgtcgccgatccaggcatcttggttagcaaccaagttactcatgaaaattaatgtaagctctttaagagtgtgtttctctgcgagcttttcaaagaaatacttgtcacgacgtttttgataagctttatcagacacccgcataacccagttgtacttgataacatcatatcgtccagcgaagtgatttttaagcattaagtacaataaataaacacttttaccgttaacataacgagcgttatttggaggcatgcggagacgaatcataataagaaatccagcgtatttgttttctgtgttttactcatagatggtcgaagcatatattcgttaactgcttcagccttaattttttcaattattgtagaagggataaatctgttgaaatttccttctggaatactgttttcttctaaccactgcgaagtagcctgtagataacctagttcaccttcggcaactatggcttcaatagcgaagccatttgcttgtttgtcaaggagtgaacttaaatcatcgatcttttcatcgttattaatcaaagagcctgtcataggtttctaccacttcatctttttcggttgcaaaacgttcacgtgtacctttatggtatatagtcagaagctggttgaatagtttcgcctcgacgccaatagcttttgcttcagcccggttgcttgcaacttcgtccatataaccttcagcctttagtttagcatcgctggcggctttaattaggttttttaaagtttcgccgtgttgagcttcatcaaattcaactttttcttttttctgtttagccattatattcaccttaataaaattcggcaatgttattggttaacttagacagaccattcttaacaaagtaagtatagatcttacctttagccgggattacgtagttattataccgttccatgattgaagcaacaatatcatcacgaatgaaatccatatcaattaagacctggttttctttaaaacgttcgtactgttcagcagtaagaagttcttgtaatttatcgtggtcataataattcattgcgatctgttcaatttcagatgctttagttggaggagtacgttcgccttcaaccatggtaagccagtagttaccgcggactttaatagaagcaacgttatctttacggtcacctttaacaactttagttacgcagtcaagtaacgcgtcaccggatttagttttaacatattttttctgcattggagaccactgcttcacattcgggtatttgtgaagttgggtaaagtcactatcagatgaaacgatttggactggaacaccttgggtggctaaaaactttgttaatacagcgatatggtcgtcagcttctaccttatcgatgttcataacaatataaggcatgtagttctcaagctcttcgatgattttatgcatcgacgtgaataaaccttcccaatcgaatggagattcttcacggtctttagaacggtttttcttataatagtgactagcgtcacgtcgccagtatcctgatttagaattatctacacagataatctgacgggtgtacccttcttttttaaactgtttgatgtttttacgcatactgttcaaaacaagatgtcgtagcatagcttcagatattttaggaaagcctgctttttcaccgaactcggtgaaggctgccgccataataatttgactgaagtcaataagagttacgccgtctttcttttcttcttcaccgaacataaaatttagagacattgaataacctattcagtagtaatggacagagtcattataaatactcctataataaagcatatttctaataccataaggaataaaaatgagcgacttaatcaaacagcattttagagcaaccaacgggcttgatgctggtggaaacaaagtaatcaacgtcgctaaagccgatcgtactgtgatgagcgatggggtcaacgttgagtatcttatccaagaaaacaccatccagccttgggccaacgatcgcgggtatcctgaaggctttgcggttactatggaaaaacgtatctgggtagcacgtacagatatcccagccccgatcccaccggcagtaaatacctttagacaaggtgattggatctccatgcgtgtagacccgaagtgggaacagtatagttcaggaaccacagaacttttaccagggacttatgcaaacatcgatacccgagttaatccggttacactagttcttcctaaaaataaagtagaacaaggtgatacgattgttattcgtgacatcggtggtaaaccaggtatcaaccaggcactaattaaagtacaggactctgcgcctgctatgattttccaaggcagcatccttcgcgaactgatgctgactcgtccttatagcatgttgctgatgacgtttacatctgcaggttggtatgtaacactttctgatctgagttctttggcccgtaccattgattctactacattagatgctactaatgatgtgggcgctcaggtacaaagctcagagtacattgtacggtattatacttctaataaaaaattaactgttcgtcttccgcggtatgctaaccatggagacatgattacctttgctgaaccggaaggcaaaacaccattataccattttactattaagacttatgatgcaaatagttctattggaaccgaaggggccacgtcttggacctctaagattaaaggtggtggtgttctgatttacgatggccctcgtaaggtgtggcgcatcaactctatagacatgcagcaacgtgtaaaaatcgttactgatgatgtagtgatgcaacctaacgaagctattactatatttggtgctaacaactcgactgttaaaactattactgttactttgcctactttagttgctcctggtgatactgttagaattggcatgaactatatgcgcaaaggacaaacagtcaacattgttactcctcctgctccggccggtggtactaaagataggattgcatctacagttggcctacttcagttccctaaacgctctgagtatccgcctgaggccgcgtggactcaagttgatagtttatcattcaatggaacttcggactatcctccggtcctagagttggcctacgttgaagctactcctaataactactggatcgtttcggaaaatatccctactgtagagagggttgattctaccaacgatacgactaaagctcgtgtaggtgttattgcgttagcaactaccgcgcaggctcaagcaaccagtgggcataatgatgacagagctattactccgttaactttggctcagcgtactgctacagagtctcgtactggtattgctgaaattgctactcaagctgaagctaattcaacaacagatgatacccgcattattacggctaaaaaattgaatgatcgtttagctacagaaactatgcgtggcgttgctgaaattgctactcaagacgaaactaatggttctacggtagatgacaggatcgttactcctaaaaaattaaacgggcgtaaagctactgctacgctagacggaattatccagctggttaatacaggcggcacaccaggaacaagccgatcagatcctggtacttctaatggtaccggcgtatacgaccatactgatttctctaaggcggtaactcctaaaactttacgcgaatataaagctacggaacttgcctctgggtgcgtatggcttgctactgcagcagaagttcgtaatggtactccggcgtctaataatattccgaccgttgttacacctgcaacattacatgctaaaacttcaactacaggagatattggtttaatccgtatcgctactcaagctgaagctaatgcaatgtctaatgctttgggtaatgcagctattactccggcgacattaaacggacggacggcaagttatacccaaactggtataactcgatatgctattcaggaagaatttgacggcgggactttagaaaacgttgcagtgaaccctaaaaaaattaaagattatttttctcgcgcggctcgcatgacgacaagacctgaagctgggttggcccaatctggaaatctgtgggacggatggacccttaatatccagattccaacagaaacacagcgtggtactcctaagattgcgacccaggcgcttgttaatgccggtacagacgatgttgattatctgacctctaaaaagcttcaagctaaaaaaggtaccgaatcagcttacggtatcgttaaatatgcaacccaagccgacactaacactggcactgctaacgatgtagccgtttctccagttcatttgaagtatgttattcagacttcagccgattggcgtgcacaagataacgttcgtggtacagtccgtgtagctaatggcgctgttgcttggaccggtaacagtactacaggttctgataatacgccaaaagaatctaacggatatgcagtatcacctaatgggctgaagcaggcattagctaactatcttcctttgaatgctaaagctgataactctgctttattaaatggtcttacgtcagatcagtttattcgccgagatattaaccagaccgtcaacggttctttgaccctgactaaagttactacttcttcagcgaatattgaaacatcggctattctgaagtcttctaaagtagaaactacaggtgatattagaatttctaatgctacggctagattgcttttaacttctgacactaatgcttggtctgttcaagctgcagctaactccgggcgtatcgcgtttattagtgaaaatgatacacaaaatgttcatttatctgtttacaacgattcccgtggtgtaactgctaaggtcaagtttgaagcacctgttattaatgccactactcaggttcagttagctggtacaggcgttattgctttagctggtacgaactcggttaggttagctacttcaggtaaaggtcttgagcttgcttctagtgatgctggtaatatcatagccgctgaaggcagtacaacttacaaggttctcactactaagaacaaagattctattcttgattcacggtatgttaagtcagctggcgatacaatgaccggcaacttaactatgaacggatctgctcttgttatcaacggatctgaaggttggtacgaccatactactacggcaaataccgagaaatatgcaagagctggttcttggacggtagaaattaagaatgcttctaagttagccacacttcctggttatgtcgttccgatcagagaagagaatcctttagtcccgggttctatgattgtaacaggctatgaagaaaaaactgccgccggtggtcttttagctcagataagtgtttcttctgattatacttatcagacttggactccttatccatctaatgcagaacaggccgctaaagcaagaacccatactatgtggaccagggtatataacccgtatcttaagaagtttgatagttggatgcgtgtatttactagcgctactccgcctacggctgcagatatcggtgccccgagttcagtaagtacttctgttaaaaccttggaagttcaagaatggattaagattggccctgtcaagatttatcctgatcgtacttctcagaccgttaagtttgaatgggtaggtgattaatgagtaatttaatggctgcatttggtgaagattttgtcgagactaacatcttgtcagaatctaaccaagtgagatattggatagaacttatagccacacatgctaatgctgttcctaatacgcatgtgctcaaaattaatcaagttgatactggaggtgccccaggacggggcatcaatatttggcagattaatacttcttttgctgatagtactcctaaaactattgatttaacaaacggtgaatctgcggctaacgccgcattcgttgagtacatgaacagtaaacaatctgggttgtatgcaataatgactaatcagagatgtttaacttctccttctgtcaccgcctggtttaaatcaaagaaatcagttgtttggcctgaacaacattatactgaattatatcctaatagcgcgtattgcgcaatatttgctgcaggcaaaggattaattttgtatgaagctttcaccggaaatgacggaattgttaaagaggactctagagcaaaactggccgcggtttatgataacgtaagcaccgtaggattatgcggtatccctcaaagggcttatgaaaataacgagacatttcgtgatacaacagggtacgaatacaaaaggtaccctcaacaagatgtggttatttctaaactagctgattatggtcttcagcaaaacttgtgggttagatttactgcagatctttttgcttcacaggctttaatatctgccaactgtactacacggatgtctgtaagatggttcaacggaacgactatgcttgattcatttaccatggaagttcctgcttcttccgccgacaaatgggttcgttttgaaaaggacctaagaatcccatctggtgcagacggatttactgctgtagtttctaggtaccctaggacgtcagttgttgctgaaagtgcagttcagaacgtcatgatggttcaaattgtagaaccagctcctatacaatcagctactcaagctgaatttggtgttaatggtattagaatgaataaagccacagaaggttctttaactcctgcagctgttatgttcgaattgcctaatactaaagttgataacagtggtaatcgtactgctaaagaattcagagaactacaataaggagccttttggctccttttttcgtataaataagttcatattataaggggacgaaaatggctgatttaaaagcaggttctacagtcggaggtttaccaatttggcatcaaggtactatgccattggtcccagttggaaactctttgacttatcgtggttatacggtttacacgactaatgataaacctaaagcagtggataacgatttcgtatctaaagctagtggtggattaggaaatcaagggtttcaaaaagaagtagaatttaaagaaggtattaagattgctgctacttttagtggcggtaatagtttaaacgggctttattctggtaatggagactcggcatctctaacaacagcaaatattgacattgtttcatggtatggtgtcggtattcgtacttcactagataataaagaacggacagtagtttggaacgctagaacaggggaccaaataaacaaaggaagcatcactgcttctattcttagttctaataatgctcctacagccgctcagcatttaactcgtaaagattatgttgatgggcgaataaatactgttactactaatgcaaacagccgggttttgaaatctggtgatactatgactggcgtacttagagctgaagccggcgtagttatagtaaataaagcgacatccggtgaatatgctcctagattagatcaggttatttcacgcggggtaacaatagattttggcacatactaagaggtagccatggccgatcagaacttaaaacaaatacaatttaaaagaactagcacagagaataaagcaccaggtgcagatatcgtagcccgtggcgaaattgtgttaaacactcatggacgcactctagctatctacactaaagacgaagctgataatgttgttcagcttgccggtaaaggtgttccattcttagatacgtcaggtaatcttaatgttgatggaaccaccacattaaaagataacgttactatttctccaaataaagcaattagttttgaaaccactgatttaagcggtgaaataacacgccatattgtcggtaaatgcgctactaatgatgggtggtatattggatccggtggtacaagcaacagtggtattcttgaaatcggtactattgatgacggcgctgaaactattcaattcgtacaacgcggcccgggcaacgttgaagcccgaaaactggtcttacttgatggttcgggtaatactactcttccaggtgatttaagattatctagcaataaagccattaaaatttacagtggaagcactcttgctcttgaaatgggtgtaggctctaacgacgtctatattaaaaaccaacgaggcgtaggtgttcttcaattaactaatgatagcaatctgaccttcagaaattaccaggtttattatgctatgaatggaagaggccctggtaaaggcggcactcttctgactaatgtagaaaacgagcgtcaacttaaacaagataatttccctataactaccggcaccgaaactcggtggactaaagttgctcttttaaaagatcccgggtcaagccagagccgcttgcaactgatggtgactaatggcggcaactacggtagcactcgtggttctattgactttattgattgcagcgctagaagctttccgagctcgttaacaagcagtaacattcgtacttatctacaggttcgtcgacttggtgatccggcactcgatgacactaaccaactgcgttatagtctagttcgtacctctgaaggtttagaactgtggtttatgcagcgcgcatttatcggtggtgttaaagttgcactgttatctattgccggtggtactgaatattatctgcctaatggttacacgtctacttcaactgcgccagaaggtttagttgagagtacggctattcgtatctatgatgaggtaaacaagcctaacgttgttgatggtaccgaaggcgttcttccaattaaccgaggtggtactggtggtacttcttctgcggcagctcgtaataacttaggtcttggtactgctgctgttagagatgtaggtgaaggcactggtaacctgatggaagtaggtgcatttggtcttggtggtacggtaggcgctggaaatattgcaaagggctctttagcagagaccgttaagtatcttaatacatacggaacatgcttctttagagtagaagataacattgctacaataccgcagtattctcctagcatttatgttaaaaccggaagcaaccagttaattctttcagctaaccacagaaacggtgttattagtgtcgtcaccacggataaaactgatggtactaatttaacggtatctcaagtatatactacgttgaataaaccaacgccgtcagatgttaatgccgtcgctaaaaccggcgacactatgtcgggtgatttaactattagtaaaacgtcgcccgggttgtttttgaatgccactaatgataccggaaactctgtaatttggtttagaaacaaaggagttgagacaggtgctgtatgggcaatacctaacaccgagtcttctggtgaggttcgaattcgtgctagaacgactgctggggtctcaggcggcgagttcaaatttaaatctgacggtacgtttacatctccaggtagtattgatattactaatggcgcctttaacggtaaaacggttaatacccaatatgccaactttaataacacaagttcaaccgcaaccgaacaaacagtttctattagtggttcacagcatacacctctggtattgaataggccgactaactcaaacttgtctatcgggtttaagctttccggaatgaacatgaaacgtttgggtattgatataaacggtgatattcgttacggtgaagcagaaaaccagacagcgaacccgtggctgttgacttcggaaaccgtagacaggtggatagttaacttcggacgtgatattaacgttgctggtgcggttaattcaacgggtgggtttaccggccctgttactgcgtacaatttgactgatgcaaatcaggaccttaatgatttaaccttgaactataccgaaccgggccatattaaagtttactcatgccgcagtgcgggtggcggtagtaacatcaccaataaaccttctggcgtcggtggtaactttattgttattgttgaatgtatccgtaaagtaaacgatggcgattacactaaccgtcaagtattagttggatctgatagtaagcgcagttgggaacgatggctaaatgttagtggaactactaaatcctggacgccgtggcgtgttaatattgttaatgggaatgatgacgatgtatcatttaaatctgttaccacgactacaggaaacctgaacagtggtaatgatctgattgttgctaacaacactcgcgtaggtggcaacttagggttaggtggtgcttcttctactacttacgctgataaaggtgttgttatcggtcaaggtagtgctctgttagaaactacagacggtcgtgttatcgttggtagttctggtgccggacgctctgttgaactccgacctggcgggccaacgcagaccaacaacttggtcaaagtaactgctacatccggaagtggcggtgacactgcgatcgagtatgcgcaaggggtgaaaattcgttctaataacggcggcgcgttgattatttcttctaaagagggtcaatcaatctatctgcgaccgcaaggtgatacatccagcacaaacgaaacccgtattgatggtagcggaaacgtggttattaatggcaacattaataacagcggtactatatcggcatctggtattattaccacaggacaagctcctactgcagcaaaccatgttactcgcaaagactatgtcgacgggcagattaatactcgtcttccgttagcgggtggttcgatgacaggcaacattacaatgagtggttccactcaggtaattaatgctactgctcctactgataacacgcatttggcaaacaaagcgtatgttgatactaaattaccattagccggtggtactcttactggaaacttaacgatgggcggtaccacgcaaatcgttaactctactgctcctactgataactcgcacctaaccaacaagaaatatgttgatgataaggttgcttctgctattagtaatgctggtgatacttatcttccgttagcgggtggtactgtaactggtaaccttgacgtaactggcaccagattaaaaacatggcagttagaagttgatggcaaaagtactctaagaggcgggttagatgttagcggcagtcttaaagtttctactggaaacttggtcgccgctgacacaaccaatgctggcggtctttttgctaaaaacggtaatgtttactgtgatgcaggttcacccggtacaaactctaactattggttccgtgattctggcggaaatgtcagaggtgttatttggtcaaatggtcaaaacggtgacatgattatccgtaaccaaagtggccgagagcttgtattcagaaatgatggatatctgcaattagcccacttggcgccaggaaacacagatactggaaacactgtaaatggaatacgtttacagcgcggtgatacgtttttcgatagctttaactcatggcaggcgggtgaatatgttcgcgctggttggcacttctataatacactcgcagcgggtaacccaggaaaagttgatcaatggttaacgatcacagacactggggtaaaaatctggggtagtgctgctaatctacgcgttgaaggtgttggtaatttctgggacgttgaaattcgttctgaccgccgtgtgaaatcaaatattgctaagattgataacgctcttgataaagtgtcgaagctatctggtaatgtttatgatttagagcttccaaatggtgatactaaaccatcggccggccttatcgcacaagaagtgcaggaagttcttcctgaagcagttacaactgataacgataaagatgcattacttcgtttaaactataatgcggtaattgcgttattagtcgaatctgttaaagaacttaaagcagaaattgaagaacttaaatctaaataatgtatggggcttcggccccatctttaaggagatatcatggcagtaacgggtcctaatgtaggaagttcagccaaggctgtaacaggagaatcttctatgattgcagccggagccaaattaagactaggaacacccttttggatgtccaacatgattggaagaaacgtctggaatgctagaataactatttcaggtaacaacccagctacgggcgctagagttcgtggtgcttggattgataagaacagtgcggcgtggaacgtattacttgattctcgtgggtctttatcaggtatatgggaaacaggctttaatttggttgtttttgggctagcagagcctagtagatgggatgggtataatgatgccattgttctagaaggtagtggaaactttaacgttaactggcgcgttgatattgaagatggaagtcagttccattttaacagctctagagattatagaggaagacgatgctataattgtacagacccaaatgctttttggaattggctttacgccaatgatgggcgaactttccaattatcatttacggcatattaaatataagtgaggagggcacgtggccaataaaatatctatatctatatcggatattctatttggggtgctcgaccgcttgtttaaagataacgcctctggaaagcttttgttttccagagttatagtggttgtaatcttatttgggcttacttttatttggtataaatccgattctatagctaatgcatacgtaaagagttcgtatgaaagctataatgagattctagtaaaaactcaagagcttaaatttgagaacacggcgctcgagcaacttcaaatagttcatgtatctagtggtgctgattttagtgcagtatttaatttcagaccaaagaacttaaactactttgtagatttaatagcttttgaaggaaaattaccaagcacagtcgatcctaaaaacctaggcggttatcctatagataaaactacacctgaatatactacgcatttgtccggaagaaactactggagtgagaatgaatttgttttcttaccaactaagaagaagcccgaagaagtgagttatatgttttcgtgtccgtattttaacttagataacatttattctggggctgttgagatgtattggtatggcaaacgaccgtctatatcagaagatcgtttgacatcaatatgtgggcaggccgtaagagctttagggcggagtaagtgattaattgttagcgtacatttccatatggcggtatacgctttcatgtcctacattaaattcttgaatcagctgtttcttttcttcatcagataactcggctatcatcttacggaagttagccgagtttaattcccttccgaattcatttctaatcccgcattcatttaaaaatgcaataaacccttcacgattttctagaatatcttcacgttgaaatttaatcagtagtgaagccatagtaataatttcagaaactatttcaaacttagacatactattccttaacagacaactcacttgttttggtatacgagtactataccttgttacacaaccattgtaaacccgtatttttggcttatctttttggctctattcagggcgtcaaaaactacactacgagaagagccgtgcaacgtataagtctgatgagcctgggttagcctgacgccgcctggttcactgttgaagtaggccttaagtgcatgattaagcttgaatttaggttcagcttcgttgctcctgtagaacttaatgtctacacgatattcttctacaatacacgacatcaagtattcgaacagatcataggcttcacgttcacgttctagctgttcacgagctacattcattatctttacctttgtgtttttgtttacgtttagagtctttagcagcgcgctttttgtctttatgagcgccgcccttattaaaatcattcttcgctactggattttgcatcgctttccttaagtttttcaatttgacgctcaagttctttaatcatttcaagattaagcatcacgtaatattgagagaataacggtttaatagtaccattccatacccaaggctcattgtcaatagtacgtttctttacggcttcttctgataaccacgaccatccggcttcatttgttaatgaaggccacttctcatacatcatttcgttagcacgcttaagggcgttaatttgtgaagttaaaaaatctatttgaagctgtacaatattaagtttcattagtataaatcctctgagaataattcattagctggccctgatttcggacgaacggtgttaatttgacccgcatgtgtcgcgataattaatgcttcttcgcgagtaaagtactcgccccactggtcgacaaatccttggttgtctccatgaacatggtcagaaactaatttatcacggaacatatctaacacgtttgccatatcgacagaataatggcgagtgcctggaactacaattgttccaccagttttcaattcaaaacgatttgctgcacatacaatacgacgttgaagtaatcgtccatcccaccagtcagctactttaaagcagatttcaggaatttcattatttacattacgcattttaccaacttttcgttaagggccttaataacttcacgcccaagatcagcgcctttcttgcaatccgctattgtccaggcttcaccattttggtacttatgcagggccctggtattaatatcttttaccaagcccataatcagatcattaatctcttgttcactcatttaaagaatcctttaatcttctgccagatgcttttcttaggagcttcaccgatctggcgaataaccggttgagacatctgaagttctatgtaatctgcaatacgaatcttatcagcggcttcgacatatgaagaaatggcagccatgaagttagttctgaagcctaacggggcttcatcatcaccgcgtaaaattgcgtactgtcctgctttaaccttaacgatggtgcctaggtaagcaccgtggtaccatacatcccaaccagcttgagttggctcagcacacttacgaagttcattgatgatttctaactttttcatattaacctctcattactaaacggatgccaactactttgatttccagatcatcgcgataagttttatcatcaccatatatttgtcctaaccgaactaaagcgtcctgttcagtttctgccggaatattatacgtgttaggtaaaacattgtcgcctttataaaaggttacttcataaagatttttcatatttcctcaaaatacgtttgcaacgattgaagccatttcagaagtaatgtttggaaaatcaatgtaagtgtttttgccacctactttgatcttaacatctgaacttaaagaagtaaatgctttagtctcagactcagtcatgttataaccaaagacacgaagtgaaccgtcacgacggatttcgatttggcgaacaccgttagtacgcttaaccagctgaacttctaagttgctacggttttcaatgatacctttgagatcaacacgagcctcgagaatagttttaacttcttcggccagtttagtcatctcttcagtaacaccacgagcactacgagttctgcgtttctggagaagttctggtttattttcttctgcatggagaactgctgcggcttggatgatatccatggcttcgccagtagcaatcagaccatcttcagatttttcgatcaggcctttcttcagaagaacgccgatgttagagttcactgaacttgcattcatcgtttcagacagaaggtcacgaatttctgcagaagtgatgtagttgttcttaacaacctgaatcagaatcgatgcagttttttcgttcagaacgtcgttagaagctttgatgatataagtaactttagacattttatttctccaattcatcattttgttggtgtaggagcactataacctgttttgaaagcaaagtaaactggtggatttaaaaatttttgaattgacaggaattgcctagggagtgttttagagggaggatgatgaaacataaagggcgcctgaacaaaacgcccaggcgcccacttagaaggtgtagtcaataatcagagtgattatcaataagaaaaagatcgttcctacgaacagccagtgtagcgtaatcatctggtggccaaaactgcaccgatagctatcagaacgataaccagaatccagataacaactgcactaccgatccagaaggcaattccccataaagcggcggtggtccaaaccataccgcctgacaggttaattagaaaagccactaaaccgataataaaagctaagctaaatttcatttgatttcctcgaggtctttaagatattcagtttgaacatcagtctgtttccagtattcatgctcatcacgcttagtacgagcttcttcggccagtttcttggcttcatcgctagtaatatggtagatgttcatacttacaagcttttcagcataatctgccagttcatcgaatgttttaacttcttcgaccaatttagctctggttttgccggcaatagtgatatcaccgtcaataactttcttaatgaacttggctttagctaaggccagtttgaaagcttcttcagtttcgctgattttacagtcaatacgtttctggacaaaaaccttacgaacttctacaaaatcacgaatcaaatcggcggcgcatttgtattctttcaacttgccaagatgatttataactgtgatgttctgagaacgacgttcgattagtttgaagtctttcatgattttttcatgacgttcttcttcggtttcacctaagttgtattccttacggaatttaactttgaatccgaaaccatgcttaccgcagtcgtcatcgtatgtaatgaaccctttatcttctaaagcatcgaggattttaacataagatgcacgatcatacttatacggaatctcagagatgtacatcactgtacgagatttcatttcgtatattccatggagttcaaatgcgccgtcaacaggaattatctttcctttaaactgcggaaagcttaccttcggctcagagatcttcttaccttcgagagcttggataacacttttcttaacagaagaaatgctatgaggcagaatatcagtagcataaccagtcgcaataccggaaataccattaagaagaacagtaggaataataggcagataataagccaccgggacatgctcatcatctttgtgggctggggcatattctgtatccttgtacagtttgtagaaattttctgaaatacgtgcaaagatataacgagacgcaccagcttcttgaaccaaccgagaaccaaagttaccttggccatctaagaacggaacattgttgttccagtcgttagccatcaatgcaccggtttcttgtgcagaaccttcaccatgatggtacccaaggtcagctacaccgcctgcaatagatgcgagcttatggaatttatttttatcactcttaccaagcatcaaggtacgagcaataacaaagcgttgaacaggcttaaagccatcaatcatatttggaatcgcacggttctctacagtatacattgcatacgcgagagcttcattattaattatactttccaagctacgaacattaaaagtatcgttagcttgttttgacatcatatcaaaaatatcagacatagtacctaccaaataaatgaaccgagatgcactataacatcagaaatgaaaagcacaatataaactacgccgtatatcataccatagtacattactaaagcaagaatagccatcacaaggatggctacgaaaattttgttaatcattactagcacaggcctttaaaaaatcaattaccgctgctaaaacgaaccagcagatcataaaccctatttgagtcgatgtggggacccatgctccagcaaagaacatagtacacagaacaatacagataatcatccagaagaaagcgtatatccgattcacttatataccccacacattttagaaattcgttcgaaacaaataaagcctacagagaacaacatcagcgatataagtttgcttgtaacaggaagacctaaagcaacataagtcccggcgcaaatcatcaatgctaggactaccaagtagcccatagcaaagaacattttcataaaactactcattagtagctctgaagaatgaatttgaagttgtcattcagaatacgattcagctcagacagggtctgcatttcagaactgtgctgacgagtgaatgccagagccagttgacctttcttgaagccggtagtcagaggtttcattttagactgtggcagatacaaaacttcgtaaacaacattattgctagccatagtacgagccagctgactacgaccctgacgaatgtgggacaacgtagcattaaaaccttgagccgaacgctgattacctacaaagaaccgggctcctactgcacgattttcaccggcacctttaaccataaagtagaaacctggctgagccagaacttcaggcataacgaagcctacagtatggccgtttttaacgtgagccacagttacagcaccagctttagtcagatcgccacgagtcatgtagttgcgggtatcaatagtcataacaatttcctcaataaagtttaagttttatcctctatgggagctaagctcccagatgttacggcttaaagaaccataacatagtatcagaccaaccaagccaatacggaacgttgcatccaataataaaagctgccgcgtgaatccatcctaataccacattcatattaatttcctcagaacagatgccttaaatttatgataatcacgtcaataaagaacactacaggcattatcatcagtacgatagctaaaacgataaagttgaaaatgttcttaagcatgatttcctccgttttgtctgtaggaacatattaacacgtcctacagaccttgtaaacacttagagattaatttctttcacgattatttcaccgcgggaaatctctagatccatctcagcataagtaagataacctgaacgcccggatagaactcgtaaggcatctttctcagtgctcatcatgaagatttggtcatcaccatagtcgagataatgctctacccagccttcaaacgttccggtgcaccaagtagttacccactcatttttaacagtattaaacaacccaaaccgtttcatttcgacatttcctcgatttgatgacgatatctatcacgaacttcacgcagagcttcaactccacacatcggagcaattccagatacagcagctgaattcaattgagcttctacatcaagcaattgatagtaaacatactcacgttcagcagaacaaccatattttgcttttccgaaacgttgatttaaagatttcattttagtactcctcattgttggtgtaggagtactataacacggtctacctagtatgtaaaccttttaaagtgatattcttcttcagaacaagaacgaagataccagccaccattttcatatttactttcttgaaccaggccagagccaggcaagaaggcagtttggtcacccatcatacgaggagtaaacctgtagacgcctgggcccacttcttctacatctaatatgattattaagtcagataatcgatacgtcaggaacccatctaggtcgattcctgagccgtgtggataaggatatcttcctttagtatggacgttaatccatcgagaatcagactggtgggtcttgacctcgatgcgcacaccttcttcagagataacatcgaaggcatagctgaatggattggctttgtcaaactcagaatccatcacacgtccaaacgtgcattctgcaaccatctgttctgctaatgttgctataacacagcgctttaaagtagaacgttgttcttgtgaagcatctaaggccattgagtggcgagcagtactaatggccttaattttattttctctactaaggtcttcaaccgttaaatcagtcggcttcagattcagcagttgtttccaagtcgagctcatcgataccatataaacctctgatatgtagttcaccataataaattcggtcgtcccattccagagtactggaatcgactaatggaaactcgttctcgacgacttcatcacattcaagccagccgtaatgggcatcgccttcgtgtttaacaagcttgccgcaataaaccgtagcggctttatggtttccacgaagatttgagatggtaattttacgatcgccggcgttgaatggattaatcattagaacctctgaatgcgtttttctaggatgtgtcggtatgcggacattgtatcaagctgtctaagaagcaaattttggtctacagggtcaagcgatttgaatacactaccgatggtgaatgcagtcagagaattaattttcagattcagttcggataattcatcgataacacgagattggaagccagtcataagtcaccttataagaaaggggacaagtccccatttaattaaccacgcagttcgtcgttccaacgagcagttacgtcttcaaggactttatacccacaggtacgcattttagcatcattgtaatcgacaggaatacttactacatcacgcggatgtactttaaccgaaacgatacggtcggaaccactaccaaagtgtctgatataagatttagagcaaacgtgcagaccagtagagcaggtgcgttcgtcgtcttcgtcaacctggttacgaggcatggtaacttctttaccaggactgttatcaaacttaccagatgcacagtcaaagtagttagaacgaaccaccttccaaccgataaagtgaccatcgtcagtaatttcgatgtcgttagcattcaggaagtcaaacagacgataaacagctttacggctcgggttcagcatcaggttttccaggaacggcagataacgttcgaagtcttcaccattttccattgctgagataatacgttcggtcaagccggatttcagttcgatgtccttataatacagagcaccatcttcgatacggacgttgcctttaacaaatttagcaataccgcgctcgatgttgatgtggtcgatggcttcttcgattttgccttcagccagtttcatcagagcagatttaaaccctggatgacttggatctgcattataagtggtgcgaccttcagtgatagaaatgaacttgcttgaagcggcccactggaattcgcgtttaaccggagctttagcggcaggttcgcgctctttaaaaacacggcggatcgtatcagtcgaaacaccgtaaatttcagctagttcttttttattgtaaagaccaccgttaaaaccttttacgattgcatctttttcattctcggacagacatagtacagccattattcacctctattgtttagattgttcggctgcttcaagagcagccatgattttaacgatatcgtcgatttgggcctgttccaggtgccattcattcagaacggtatcaataactggatatttttcatggaactctttcaatttagcagcgaaaacgttcgcagatgtttcttccagtctattataaatctgattacataaagctaaatcagtattatctttcactgtgacgttgctcaaccgctggttcatattaaccaggcgattcaatgaatcggaattagcattaccttctacaaagtgagtcagaaggaacccaagtttcttcttattaataatgtgattaatcacacgattgctacggaaatttcttgggagatagcaatcgtaatccactgcatcgatagcatcaatatactgatcgatgatataagccatcatatcaacaaggttttcgttttcaaataacgctttacgacacccggatgggcgcataaccaagaactctgtgataccacattcttgggccaaaatacgagcatctgtatcgttaaagcagctgatatcagatttagccgggaaggtcatgaaatcgtcacgattacgaagcaacacaaacccttcgagttcagagagttcactagaagttaacttaaggttttcaatcgcccaaccatttttctcagaatacgtgtaccgagcaccgttcggtgaagccggacgtttctctgcaggcccatcgctttctactttaggcagcttagcacgcagttcttcgcattcagatactttatacgtaatgacttcatcttcagccatcacttcgatagctttctttaagaaagcctgttgcagttctgactctggattaataacgagaacgaaatcgtaactggcaatcttaccagcatgtttaagagccctgatagttgctacacgcttagaagtcttgtcatcgataagaacagtcaatttcttcttatctatgcctaaaattgaatctacataaatcttagaacgcccaccatagctgtttttgaaacggtgcaatttgacagcgtcgccgtcatatgctacagcaccagagttcatcgccatgtcacgaagcttagtgatatcatactttgctaggatacttgcaatagaacctaacttggttttaataccagaattggcaatgatgttacgctcggcacggctaaactcgttgtacttacgaaccagttcacgttcgttagtgatttcgtctagttcttgaatgtctctttcgaggtattcttggttaatcttagagacacgggcctggatatttgccacagtgtccgggtcaagagataactcttcacgagaaggagtaatatccagttcacctaaagggaacttaatatacacccgcgaataccgagcacgaagccatgaatctttaacgccttgaacgtcattcagaggatatacaattttaccataaattgcatagatgccgttattttcgtaaccgttgtactggtctgatgtgaatacatcttggtccgggaagaaatcaacttccatctgggttcctttcagaactacagaatctttacccatagggcgaagaacatatttgatttcatgctgccatgcactgatatcgtcggttttaaccggaacagtgatttctaagccggtagtttcaccttcggccatttcttcatcaaaggtaggacgaattttaggcagaccaccgtccatcattactgtataaccacgagagcggccgccatggttagatactactgtaaaggtgttagtatagcttaatggagatttagagccaagacccagagcaccgataaagtcgttgctgttgttcttagtggattcgaagaaagtagtgtacagattaatcataccatcttcatcaagacccggaccgaagtcacgaataacaaatcgtgggtcaagacgagaaggaaccttaatttcaaatggacgagtacagccattcaggaaatgggcatcaatacagttcgtagagagttcacgaacgattgcacggatcttgtttttgtacaggttagaagacagaacacggaacgctttggctgaggctttaatagtaaaatcggttgatttaccgccagagcccattacaatttcatcatcagttacgagtttcattttataccttaatcattatgtaatttaatcaattcggcgcactctaagagctcttcggccgatgcacagtcgtgaattattttaatacgaataccattgaagcgttctttaaacagctcagcttcgtcgatatcaaagaaccgttgaatcattctatattctttgaatatagcattatctaacagagtcaagttaactttatagcttcgcattctgggccaccttgtgctgaacatactcgcgtgtagaaccaagctcagccaggattcgtctcatttcgcccattgtactcttttcttcacggtgtaagtaaatgagctttaaagttgagtcacgttcagcgctggttaactcctggttcattttaatcttatcggctatgtttcttacagccaacaggtactttttcttcctggcggcgtctgagtctataaattcgacccgcctgattgcagattccatcaccattctggctatgttatctaaattaactatagcgttattttgcattactagattcatataacctccaaagggccgaagccctttaattaagcggccatccaagctttacgcttagatgcatctttacccagaagcatttcgaacaggtctttccagttttctggcagtttaactacatcataaactggctcttggataacacgttcatattcatcacgagtcagagaaccgagccctttaatatatcgaatactatgcttaccaagagattctttagctttgtcgtaagaaggcagatcatagaaccattcttggtttttacctacttgagcgataataacaggagtttttacaaaacgaattcgaccttgctcaaatagttctggccagtgactgaagaaagccaacagcgaaggatagattgaacctgtaccgtcaacatcagcatcagtcatgatagcaatgtttttatagttcataccttcagcagattcaccgatagttaatccagtgattgcacagatatcaaaggcttctttattttttaggatatctacagcagacataccccatgtgttcataaacttaccacgtaatggatatccaccatgaagttctcgattacgaacttcaatcaaataaccaattgcagagtcaccttctgttaagaacagggttgtgtcggcatctttgccgtacatgttagccttgatgtgcttttctactttagctttagcagcttttttattagctttagtttcagcggccttttcggcagctagttttcgagctaatgcagcttcgacgataggcataatcaggccttcatctttcaagatgctttgtgcaatctttttggcgtcgattttaatatggctgcggatctcaccaaaaggagaagtcaaacgttctttagtctgagaatcgaagcgcatattggacatatcgcgaatgaacataatcatagtcatgcattctttaacacgtgccttagttacttcaatgcctttgtacttgcgcttaatgccgggtaaaagatgctcgcagatatcatcgaatacacattcaatatggtgaccaccgttcttagtatggatgttgttcacataagttagatgtcggaacccatcgtctgaattagtaaatgccatagaaacgttatccgtttcttgaattactacactctcaccgaactgcttagcaaactttttaaagttgccatcgacctttttaccgttgaaagtaaatttaacatccggataaattacagccagagtttgaagacggtctaaagtgatttcgctataaacatcagtcagattacttacttcaaagttaacaaagtctggaataaatgaaaccactgttcctgttttagctttgacatgttctttcttagaggccggaactttattccagcttatagaatccataccgttagaacactgtacagtaatctcattctttccatcacaggtggcgccagcgaacaaaacggagaagatattggttaaactagaacccacaccgttcataccaccagtcttacgttcggcgtcatcgccaaagttaccaccagcctttggaatggtccatgcagctacagggcctggaatcatttcaccggtaggggtttcaaccatgtcctgaggaataccacggccgttatcttctacgataactttatttccacgaatttcaacgtcaattttgttggcaaacttaaagctcgtgcgaatagcttcatcgacggagttatcaatgatttcatcaataagtttaacaaggccaggaacatattgcaaagacacatatttaccgaacagaaaccgttcatgggcttcatgagctgaactgccgatatacatcccactacgttttttgatatgttcaacgtctgaaagtactttaatttcgttcttaatcatttcatttcctcatgtagtggaaactatattatcctgtattctaaaaagcaaaagggccgaagcccttatttcttacgaagtattacagtgcggccgttagtaagtttaaattcacgcatttcaccggagaccattttaacccgaggtttaaagcccattagtagtcacctgatttaaggccgtcgtagtgaactgccggagcagacacagtacgatgcattttaccttcgcaattcaggaacggacagtctactggctcatcgcgttcagagattttacgaatatattcacgctcttcgtcacaagcttcacatttatagttatacgttggcaaaacgagttccttctaaaagtttaattgcggccaaacgagatttttcatctgtcacggttagttcaatctttgcagatccttcaatgactagtggagccggctcaacagtaccgacgtcgttctcaacatcttgcggttcatcgagttcgccgagctcaccaagctcatcgagatattcttgaataatcatatcacccgtgatgttgtttttgaaatcgatccaacgtctaaagaactgacgttctgcttgaactaacgccagattgattttctggttacctacttgaatagatttaacacgagggctgccaaggctataatcaacagctagaaccttaaaccggttcaaatgaactagttctgcaaaacgaatgttcagtttactgcgttgaactaaaccttttaaatcagtacagatgtaggtttcaccttcttcccatgagcctgagtcaccaccaaagccgcagacttcaacaaagaattcgtccatctcggcgcgggttatgtagagacaatctttagcatatgtaagaatagcgccgcttttaaactggatacctactacattatcaatggcaatctgaataactttaaaaatgttattctggatagcattagcgatatcaatatttgaagaatagttgctttcaaactgtgcccgggcttcatcactgataaatcggaagtatttgtttttcatcttaggcctcgtaggtttctttccagtaatcagtaccgttttcagagacttcacggaaaatagcataagccggaacagtgtcgcctaatttgttatagacatacacgatttgggtatagcataaaaattcagtgatatctttctgtacaaccactaaatcgggattaaacagaacatcttcgaattcatcgcgatttgaatttgtggtagctagaactttcattttattttcctctcatttagttggtaggaacatagtatcatgctcctacctagttgtaaactacttagtgataatgtttttcactgcagaacgtggaactaccgagtagtcgccattatgaacaacgttcagaagttctacgccatcttcaacccactggtcggaaacccagccacacacgcggatgaaaggagtttcgatttgaactgctttacacagaagatcgtcacgaatatcatagtcgtcgtcatcaagagccacagtcccaatcattgatacatactcgggcgatacataaccaacaaccccattagaagagataacatattctttaatttcaccaagccaaccaaaacggacggcatctacaatacccgacttgccagcgatacgggaacgggacttggtggatacataaaccagagaatcaatagggatcatttttatttccttagcgaatacagttagaaagttcaataccgacgtcaacgccgaaattataaccagcttcccaacctttcgccatagttgctttaacaactaaaaccatgcttggggagatttcaggaagaatggtcgagttaaaccattcttcaaagttttcatcatattcaaaatcgttcatcgtgttttactcagtgaaagtggatcggcttcggcttcagatgggcattcatccaggccaagagcgtaacgctgtgcatactttaacatcaaaatatctttagcacaatcgtgaagactatcgtgggctacaaagcctttaagggtgccattaggtagaggagtcgtagtcataccgcgtactgtactgtatgcttcaatagcagtacggatatcacgctgattccagaacttaacaggctcgagcttaaatgtatcgatttcattttcagggatgccttcggcacgatacagttcacgaatcatatccgtgaaaataggaatatcgaagctcattccacgacaccacatctgactgttccacggatcgacgccttgttcgcgaatccaatctaggacaatcttaatgccttcgataacggttttatcttcagtagacggggccaagttcttacgagcttctgcagattggtctttccaccaagctaaagttgacttagagaataatctagtgcctttctgtgaagcgagatcgaatttaacacgcaggcctttagaaataagttcatctaaagattgaaccacttcagggtctgggtcataggcaattaaactcagatcaattaccgcagagttagaagttgtagcaaatgtttcgaagtcgataataatatcaatcatagtttaccttcataagcaatcgttgacataacttcaaccaaattgctaggaataatgatgtctggtgttgcacctagataagatgcaacactaatagcattttcgcaaatacaacgaaccttatacattgcttcagcttggtgaggcatcatattttcatggcgagtgtcataagattcaattaatttgttagctgtatgttcgttaatacgtagcatagttcacctatacataataaacatcgtgtcggcctcgtgtagcgccaacatacaatagttgtctagccaattcggcatcatttactacatgaatacagggtgtatatagaaagctagtatctactgataacccttgagctttatgaaatgttgaagccggcagaggttttactttatggaacatacgtttagcggcccagaaagatttccaaggggcctttccgcctttctgccagttgcgataagtatcagcagccttagccaagaaggattggaatttgtattgttcgcgttcatcagagataacgttaatagtttctagatgataatcttcatccttgtcataagtttctacagctaaccgccagtgtcgaatcatatattcaccggagacacctgtacaagaaacaaatgatgaaacatattcggcgctaacaatacgaacatactgcccgttattaaatttaaggtcgttaaaccttttaccttcgaattcaatctctttgatcaaaggctcctgcattactataacttcacccttgataaaagcatcttcagtctcaagaattcgccgtcgaataatagagttcaatttatcaacagatttattcgtgaaagcaaacatcttgttttcgaacatatcttcagggtctttaacgatttcaaaatatttcatcatgaaatctttaagagccgtggttgacgtgaacccgtgaacaccatggccatcttgctgatgatcgtagatccatttaccattacggatatctgtagctactttaatgataggagcgttactacgcatcacttcatcaagttcaagttggtcaaaatctttatgagtgaaaaacggcgatagagatggttcagtagagccaggttctacaggacgaatctgggccttatcacctatagcaatgacaagacaataccgcggaatggtagccatcagaatccggaacagttttcggtcgtacatagaggcttcgtcacaaactactacccgtaattcagaaacgtctacttcgcctttttgctcaaatgttatagagtcttcatatgtcgtcgggttaattttcaacaagctgtggattgtcctagcttcaataccagacagtttgcttaatacttttttagcagcatgtgtaggagccgctaaaacgacaccagatactccttgagaaatcaagtaatcaacgatgaatttagtcatcgtagttttaccagttccagccgggccatttaacgtaatatggtttcctttaccggctttaatacgactgataatatagtcaaaggctttcttctgacctttgttcagcatatctaaagtaatcaagctaattttacccttttaacatgcagtgtgctaatgatttggcggagagatttaagttcgtcatcactatagtgcgttgttacgataagcactttagggaaccaccacttgcgtgggacgacttgacgctctacagacttaattcgagtatcaaatttgtgttctaagtaagcctttaaaccattatattcttttttagccgcggcttcgtcagagaagactgtgcagcatccaccgtactcataaggaagcacgaacccgtgtttgtccttatatacaagcgcatatccatagtgcatcatcattacattttacctttaattaattggagcagtgaacaattcaatggcagtcctttttccaatttcttggtatccaaccagctacgtttctctaatcgtttaagagcttcaacaattataccatagatacggacctgttcctctgctttagagagcttagtggcattcttagcgctacggccgtcacgaagagcaaacagcttagcttcttgacgacctatctcagccttgccgccttcaatacgagctttgagagaagctaccattactttaccggcttcatcgagggtttcttcagataaacgagaattcagggctgcaattcttccttccattcgagccttaatagcttcaatatttttctcaataatctcaattttagctttggtttcgtccgctaaagttacaggcctgttatctgaaccacgaacaatgcgagctgatttttctttggctagagattccatctgctcaatagagtaatctcttcttgcagagttatatttctctttgacaggaatcacgttaccgatcacgtaacctttgtcgttgtcccaacgctcaagagtcattgagtcaggaccaaactcggcgaacttctcaccagagtaagcacagtgtgtttgagctaaaatgttagccatgtactcaaaggtaagattgaattctttacctctggacttagccgattcaaaagttttagccagacgacgtgctacgataacttggttagatgcttgcatgattttatcctcaatgttggtgtagaagtatagtaacatgcttctacaccgttgtaaactactgtttgtgggatccgtgctcagcgattttgcggtcacctaagaagatcttgcagaggcagttatcattgacttctgcatattgttgtgcaacccagtggacgtcaggcccgaagatggttttttcgaagctggaatggtagtgttcgccatctatagtgtaccataacatgattaagaatttgtgcatttttgagcccttatttgctttaaaaatttgaatggtataatggtttcatggatctttggcttcaggctattaccagctgacaagttccagatgaagaatagtataatccgatgtgtttgtatctggattagatttatcttcgatacgtaatatgcggtacgctgcttcctttggaagcataaactcgcactcaccttgaaccatatctaacttatcctcgcgttgatcttcaactggtactaaacccatgtactcttcatcaggagcaccaagaagaatattggtgatatcttcttgataattgtatgcccatgggcagttctgtatgcttagaatcagatttgaatcataatgccattttgaagcaaactgtttagccgtagagaaatcagaactgaaacttgtaacacgatctaaagtaaatacgtctccttcggttaaattataaagcttcttggcctcaaccattgatacccctcgatataattctgcaggcactgcagtagacatatgctttcgtacgatagggttcaatctagaatgaatgagttcatcatttttatcattcaagcatagccacagagtactttgttccatatcagtgaactttgcatcaacacgttcttgaatgtaaagacgttctttttcttctgatacagactcagtatgtgctttaagtattgcttggtaacctttttcagagatagaaatggtaatagggcagtttgtttcaacattgatagctgggacaagcatgatgacctccattagtaagtgaaggtcatcatatcatgataggagggaatgtaaactgtttatttttacttccaaggtgcccatggcggagggtcacggtagtaagaagccagctcttctagagcggcgggagggagatttattccatgtttctgtatgatcatatcaagttcgttaatcaagtcctcaggcggcgatacaggctctttagcggcggcctcgaacatttcaaacagatccattacataaaccactctaacggttggtattgacggatagctgcagccttttcataatcttctacggcacgtttaagattagtagacggtacccagtccgcggcatcagcattcatgtagttccagatcattttagccagataccgaatatcatcagatgctgtattgagaataatcttatggcctttctcaatgataccgttgctattgtaatcaaaaggcgtttcaaagcagctaatatgtttgtagccgttcttaataagggcatcgtgaacaccccatgggctacctttacgatagataacatcgtacatatgcatgatacgaacttgaccgtattcaatactaggcacccagcttgtatctaagaatttgtcaatcaaggcacggacgtcgtcagcgtacatgttgtataatgcaacgtcaaaggttctaatcgcatcttcaatacggccgtctttatcggccaagctaataccgactttatagatttttgcgtctgccacaataggctccttcagtcattttgttttcttcaaaccacttatcgttcgcagccattatagctggtcctgccttaagcagaaaaatcattgctctgatgcctcgataccaggcaccaaaatccgatttcttaagtgggcttttgtagatcgcgtgctgataattaggcctagtcgcaactaactgagcctgagtcacaactggagtaactgctaccagagtcatatgaacttcctgcataaactgccgctgctgtagcagcaattattggtgtagaatcaacgtagtgtgaagtataattagagctagagctagaaccagacaaaggaaccatactattccggttacgttttctggcctgtgccgcctgttcttggatttccttaaatctagaggcattagcaatagtgacttcatctaaagctttttgtaatggggtgcgagtgtctttaataacctcttccatcataccgtcgccaacgtaaatatattcgcgctctttaacgaacgactgcttttcaggaacaggccttggtgcaaataaattctttaaccaattaatcatggaatcaccagatatttgttagccagttcaataacttccttttcactgtactcgataattttcttctttgctttattattacggtccttttctaaagcatcccagaaatcttggtcaggggatttctcgttagccagagaccaatctaagaatcgtttaatccaattcatacgcggaaagtctcaaacgaaatatgggttattttacgcttatttttatgcaaggtccagtactggacttcaatggcagcttcaagggttgtgcctacttcgcgataagcatgggtaataacatcaaaataacaaaatgaatctttagcatgcaaccgattataatgctgttcaataagagtattgatgccgccgcaatccccgataggtttacgccaaggtgtacttttaaccatcttcatttcctcatgttgttttaagtattctacctactctactaaaagcaaaaaaggaccccagaaggagtccttaatattatacctcggcgttgtccggggttgcttcaaacatttttgcattagccgtagcccaagccgctgcatcatcaattaccgtagaatacgcaggcttttcagacgggaaagtttgatactgagcatcagcaatgcggtgcgagtcggaatatactttgaaatcaaccgatacttcagtgcctttaacttcaccaccagccacggtatgatcaaaagttttaatatttacataagccatattatacccctttatgattaatatcaggagtatttataactcatttttataagctctttcaggagttcttcattggcttcgtcgacagcaatacggaacacttcatttaaagggtctaatgcttttaagatttctctgtcgatttcacgagtaatttcttcttgaagagcctttactaaggccctttctttttgttttcttttaatttttaaacggcgtttagatattcttgtagccattagtaaccacggtcttgacgggcaaagttttcggcattcttcagataatacaatttgaaaatttcttcagccgtcataccaagaccctggaacatgttaagaacgaaatgaagaatatcgatcatttcgaatttaatttcaagctggtctttaggagacagttcgctaatcagggtattacgtcgttcggcgtgttgagctttccaaggcttccagactgcagatgcatctttctcaccgttagacataccgcctaatgaagtcagaagttcacggaactcgtcatcgatgtagtctttctggttgcgaagccaatcaaccacatcacctgcacgggctaatgcatcaggatgagcgttgtgttcaggcttatcaatagccagacggacctgcagagatttttgcatatcaagcataacttgaagagggtcagaatgttttgcaatgtggctatcatatgcagcctgagctttatcaacgccatcaatcagttgagaacattcattaaaatgtgccatgttattcctttcagttcagtgtggtaagtagagtaattatatactcagttctttttagcgttttcaaagaactcttcggttaaacgccggttttctttttctttttctaaccgggcttcttctttcttaaataggactttgcatgcatctcggaaagaagcttcatcttccggtgtttcaacgaacacagtattaacgtttgctaaacctattacaatagcttctttatttgcatcaagccatgcaacgtccttcataggagctgtgcggtaaacttcagattcgatctgcttaaattggtcgtaagccatttttacgttacagcggtctaaataggtatcgccaaacttttctaagacttccaaagaaactctgtatccatcagcttcgatgtagcctttggccacatgctcttttaagttgtctactatagatttaggtttagtttctttaacttctttaacttctttcatcggttctttaggtgctttatctactactgtgtaagcatacttttcgttattaacaagttcttctatacgtgaagcatacacgtatgcaagaccttctacagtagtttgtttgtttctgacatttttaatccaagcccgctgatcttcaacaggcttttctttgattgcattataaaccttattaaggctagaatccaagtcagaaactaatgcatctgaacaaatcagtttttctactttagtagaagctttagagcagtcaaatgaagcagcttgggccgaaaaggaagcgatagttaaagcaattgcagttaagatagttttcatgataatctctcctttagtttgtaagagcactataccatgctcttacagagatgtaaactgcttattgaacaaaacctaagtttttagagatttctctgtagcgaatcattttatctaccttagcccacttagcatccacgtcttcagagaacctgaagtcagtttctagggtcaaatttagaacagcccctagaatatcgttaagctcctcagttaggcgttctctgttagtcttgcctgcgtattcagagtcgaagccgaactgcataattttagagcaaatctgggctacctcattacactcttctgatagcttaagaagtgcgtgctgggtgttattcatctataaatacctttaataggaggataatatgggaacgatattttaccaaatttggaaattatcagataaaaaagacaggaacttgttgatgggcttccttgccttagatgtagtcatttggaaccttttggtagtccctatagcggctacccaaggagtggtgctcccgcaagttactatagagcatatattgagtattgtaagcttttttactggagccccatcttaaactttagcataacggcttaaccgcattttagccattaacccagaagcaatattcgtattcagatatttgagtatttcttcaggtgtagccccttcgtccttaatcatatcgttgatatctttcgatgcccaaggagcattgtcccagaacacgacacgttcaccagcttctaccagcctcttcatacgtttaatggtatcctcatgccgaggttcattatccataatccaagcacggttccctttaaaaggaaccgtgttcaaatccatagatccgcctgtaatagcaatagcattaggtacaaacaatgaatctattggtccttccatgacccatacaagtcttgactcatccactgtatcgagcccgtagattttagttgcgtgctcgtgtgctttgattgtgatgtatttctgcggagcattttttcgaagtgcacgtccttgaaatgactcgatgtctcctcgtgcattaaagattgggataaccaagcgcggttcgctcttttcatctttatatgttcctggattaactgagttaacaagagcaggccattccatagtaaaccataaccgtttccagcttacttcaggaatacaacgggccttaacatacttaataatagggtgatcgcctggcaatctatctagacgctcacaatttggcaacttctcaatcacgggcatctttgctttaatcttttcagagattgaaggaggttttttctccctatacatgttctctttacgacgttctagcaagaattcacggtacagcgtttcatcggtttctttaaggaatttggtaaaccaagccttataatcacagttgaagcagcctacgcgtagtccaccctctacttcaaagcaccaaaaacgagctttcatctggttcttctgagagtcgccacagataggacatcgacaatttaatttaaaagtacttcctgggagttttcgataacgaggcagaacagacaatgcccgttctgcaaattcatagtcaacaaagttcatatttacctcttggagttattatatcactcttcagaaggcttatctttgcgctttttctgagaaagggtttcaggacccttattgacaacatcgcccgtagttgtaccagaagcgatatcagatggagagccgccagaatcaccggcgaccatttcagataaagattgtttgtactgatcaagcaaagtcatagctttctcctttttgcctatttataaaccaacaatatcgcaatggataccttcccacgaattttcaaattcttgccgttgaattatctgttcccaatcctttcggaaagcacggcgcagttttctcagttgtcgctttgtaggtttacagacaaatgtttcggataaaacatggccgaagataactttatcagtacttccacggtctaatactacttcccacttggcatcagacataataggacgcttagtatagaggccggaaatacaagcctggtggtacataatgtaagttctcataatccaatccactctaaagtttctttagcactaaggttttcacagaacagattagttgcggccacaactatctcaccgttgttgatgcttttgatctgagctaattgatttttgtcagcagctttttcgagctcttttataactacacctcgaagtacagacatatcagaagatatggctaactcacacaacggagaagtgtagtcagctttggcaaaggccggctgggcgccgcaggcagaaagagcgaaaattaaagcaagaatagattttttcattatattttcctcaaaaataagcccttattctacatctgaaagaggtacgtctgcgcgagagtctcgatcaagatttccttcctggtctgcccaccacccacagacacgaacttcagagttctcgtgtttgtacagctgccgaacaaacataactttagatttcccttttactttaacaggaaaaccatagcgaatttctggccgggtaagataatggtaagcacactcgtacccgtccaacacaaatccgttagctgaaaggcctaagttaatgaaagctcttccgttatacttttctaagtacttgttaggaaccttttcctgttcgctgacattataaagcccgccttttactaaagtggcatctttatacccaggataagaattttcatagttcatagtagttcctcattttattggtgtaagagcatagtatcacgctcctacaccgttgtaaactagaattttaaatcttctgctagtttatcgaggtcagctcgcgatgaaacctttttctgaagattattagcagcttgcttcatctgggtgccttgggcttcacgctgggtattagtatgggtcgggccgccttcttgggcgatttctacccagcgctggttgcctttgcgaacgccgatattgaacttgttattgatatttttatcgccatatcgagatttaatctgtttgattaactgttgcttcatctcggccagttcaggcgtttctattacggccagcataaagtctgctgtagcaggtaggcctgctgattctgcaacatctgacatgtcaatatcactcgagtcccaagcactacgaccagtctgagcggcggaccatactgccgtctcggtttcaactgctaaaccgcgaagttcttcagcaattgctttaactaatgtataactattttcggtatactgtttgatacggcaagaagcgcagatacctaagtagtcaataatgatgattgttggcacgaagttctttttaagcttcagttcattcaacaacgcgcggaagttattggctgaagcaccgccggtagggtactgcttgataatcaaacgacccagagtggaggtcttacgccatctttccatcttggctttatactcagaatatgatacacagccgtcatcgatatcatcaagtgatacatcaagaaggttagcatcaatacgcttagcacatacctcttcggccatctccatagagatataaaggacgttatgacctgtctgaagataatctgcagctaacgaacaaagacccagagacttacctacgttgacccctgccatcaaaatattcaatgtgccggtttcaacaccacctttggtaattttgttcaggatatccagtttaaatggaatcttacgagatttgttttggtaagccaaccaacgagcttcgtagtcgtccatccagtcatggcctatataactatcgaaagatactgataaggcttcacgcatgatgtctggaatggcacctaaaccaggtagacgcttatcacgttgcttttcgtctaattggtcattagcctggatttcaataattcgagaagtagcattatacattgccttctcttggacatatttttctgtctctttggtgagccagtttaaatcttcaggagcatctgtaagtttagatagaagttctttagcaccgcttaattccacgtccgacatagaagacttgtctaacgcaatattaattgcagttttcgatggaattccattatactcattgacatggtgatgaatagctttaaacaaagtcagagcaggtcctcgttcaaagtattcatctttcatgtaaggccatactttattaaagaaagcctgattgaaaagcaaattagctaaaattgtttctaccacattgacctcttagaaaaataaccctcgctttttaggcaccatctcaaattgtcttttaagacactgcacgacgtgagggtataaaacgtctttatcggacggtgtgctgaatttaacagccacttcaccgttcggcttaatgtctagttcatggatataaacgatgtgttcttcaccgtctaatcttatcaccatttcttggataacactagccattgcttctttgattatactatgggatttgtcgaagattctttgtgaacgttcaaactccccttcttcaaggggagcttcagcttcaatttcttcggccagagactctaggtccaggtcttcgaagttattcttcatcggcgaaattttccagttcgtcttcaatctcagcagcactaggggctgatttggcttttaccggaattttagacgttggtttagaagataacaggtcagcaaccgcatcgtcaacttctttaatagaagaaatagcaccgagtttatacttggtttcgattgcgtcacggaatggcttatgtttaaacaaaggaccccagaattctacatcatctgtggctttagcacgccatgacttttcttcttgaaccatttcaccggtttcttcgttcaagaaagcacgagaataccagcctgctttaggtttaacaacaaagccaatttctgtggccagttcaagcaacccagagaacggatcgataccgcctttgaagttaacagtgatcgggaacgtggatttctcttgaactgtacgagatttctcagctttaagagtaaaatcataccctgtcagttcggtaccttctttaacttgacgtttagagataaagaatacggtacttgcagaataaagaatacctgtaccaccacccataacttctttaggatacatactgccgatttccatagctgtatggttgatagccacacaaggaatatctttaatggtcagataaggtgtaacgatacgaaacagagatttaagagacttagcacgagtcatgtcaccgacctgtttctcgtctaaagcatcttgtgtttctttcttagaagctgtgttaccaatagagtcgatgaacataattaccttgtcaccgcgttcgatagcttccagctggttgaccatatcgattttcagttgttcaactgactgaatcggggtatggacaacacgttccaggtcaacacccattgaacggaaataactttcagaagcaccaaattcgctgtcgtagaacagacaaattgcatctggatatttcttcatatatgcagcgaccatagtcagaccaaacagagttttaaagtgtttagacggcgcagcaaagattgttaagccactttgtaaaccactattcaagctaccacctaatgcgatgttcagcataggaattcgcgtcataacttcatcacgattattgaacaattttgatttagtcagatcagcggtcagtttagtggtagaagctttaatcaggcgagatttcaaatcagacattaatatttaccattagtcaccattatatttttctcacgttgtttagaaagtaaagtaattatacacccaaggtttaacagcaattaaatctttaaacctactttgctttggcttcagccttagcgatacacttttccactttggaataagctgccaacctgtggttgttcagagctttatagttagcttcgtagctatgaatagaagaattcattaaacgctgctgaagtacggcctcatccagtttccagttgatttcacactgccgtttgaacggtgagcttttaggctgttttgcctgctcaccagcgatgatggcatccatcttagcgtcgtgttctcgtttcatagccatcgcttcttcatggtcactagaatagtggacttgattagcgtttgcattacggacataacctatattgttaccaccaacagtaaagattgtacctacatcagaaagacgatacgggtatccttcagtctgagcacagccggtaagagttagcgcagccagtatgagaattgatttaagtttcatagttcatagtttctccaaatgtgtaggaacactttaacacgctcctacaccaatgtaaaccgcttagtttacaaaataaacttatcaattaattactacttggttataagcaggaatattatatggagaatttattttagcattaaaatagataaactctgctaatcctgggtgaaacactttttcagggtcttcaaagtactggatagttggttgacccattagtacttggtagtattctttcttggtcaagcgaagaacatggatctttgcttcttcagggtaccgttcacgtttgaaactcatgtttgggtctgtgatatacaagtcgcgatctgctgcaatagcgcattcaacaacccggtcaaaatgataacatgggtcactgatacggaatggatgaaaaataccatcaaggtggattggttccaggccttccgtataacgttccatgacactcggattgatgactcgttgatccacaaagatacggcccggaattgctcctgccgctacgaggacgtctttctgtccatgattaagaacaaacgttgctacagacttgtttacagattcggcatcaatatcaataaactcatcaatataataccgaggattctcagggtctttagttatattaaaaacaaagaacacctcatgtttgcctcggtatccggtaatgtcagtcactagataagagcagtcgtagtaatcaactaaagaatcaacaacaaactggttctcttcccagaaatgtttacgggtttcataagcattttccttgtaccaaagaggaacaaattcaaactctgggaatagttctttacattcttcgatatcacttgcattacgtggaaccgcaatgatatcaccagcactggcacgattcaaatgtaactggaagttgccgtccttaaggacggcgtattcaccagtttcatagcttcgcatactaaagattggtacacggaaataagccatcagataaaacctcttacataatcaaaatcacgttcaaagacgtgggctgaaaccatagtgtgagaatacgtacctaattgtacaccacattgatctgcaatgtattgcattaacttgccttgcagataaaagtccagctgcatcactacagcacagttctgtgaacgcatatgtgtatgggcataaagcttgccttcacggatatagtacgttatagaatctgtgcacgggtattcaagggattcatctgaatctaacagtgcttggtctcgttcttggagaatttggaacacaacacggcgcgagttaggcttctctttaagctctttaagtagggctggtaactgggctgcaattcgaggtccatagaaagtgttgaagttttcaggcaatacgtcacttttcggcttactaatgaacttagcaacattcggatattccttaaatgcttcagccgcatcggtaccgccagaaatcatgaattgccagaatgcttcagcataatcataatcaatacggttgatacgagaatcggtgaatttgtacgttgtcggatcgcttacttcgattgaagcagaaccgatttcattacaacggccaatacgagaatcagtaacgaactgtggattgttgagaatctcttcgttcagtactttaaatgcagtttggaaagatgggtatgaaatatgtttcattctgttgtgctctgacattaaaaatcctattatacaataaaagaggccgaagcctctttgcttattctgggtaacgaagttcgtcgtctgaactggtaacgtccacgatctgaatagaattcagaggacgatcgttcttagacagctgacgtttatagtaacgctcacagtaagtacaagtactgccacagacttcattagcgcaatcaaacgtaggatgtttgaaccaacgtttttcaagaaagccgtccaacagcgatgtttcaatgttcactgtatggctatagttagcgtcagattcgccgttgtagatagtttcgagaggtttccacagctcaagaagattgccttcaaacttctctgaagaatacgcctcaaggaccttcataatgtactcagttgagccggtccggccagagactttgaactgtgtaataccaatgtcacggtacagatgcaggtcttgcggacgaacaaaacgagttcgtaaccagttaaacggatcagtgtctcgggctttaatacagtgttgcatcggatacccatttaaggatttagcatcgtcagctgtaacatctgtgctatggaaaatataacaagagtcacgataactgcagtgagttgtataaccttttccggcgttagaacagaactcgttaacaaggacttcaaaaataattccgttttcattacaaaacgccgcggcctgcttcaagaagttaaccgaccggtttttatgaattccgcaacacactttcttaatgttgtattggtcatgaagatatttgatttgagtcacggcatcaatatgaagtatagttgaaacttcgatctcaatctctttattaacttcacgaacaatttccattacaactggattagcgatagtaatacgccaaacacctatagaccaaagatactgaacgtactcttgaatagctttctttttccactcatcaagttctcgttttgaaccgggatttattgtattaaaggtatagttaaaacagattcctagttcattacagcgcttgacatactcttcaagaaaagacttgtcaacgtcaggtaatctgaaatcaggccttgctgcgatgaaggccatttctctagtagagccatatacctcattaataaggctgttcggatattttttgttgagttctacaattttatccaacaaagctaaatcgaaatttgttcctactttaaaaatattcattttgcatctcgttgttaactgacgcgatggtttttgcaggtcttcttactttaaattattttataagtttggttataagatttaaaagattcaaattagccttattcattaaggctttgaattagtaatacatagctttgtcaacagtaattagccctttgtattatttcttttactaacctcataattaatataaccattcaaacgttttaattctactgtatctacgttaagcagattattcttaccgtcatgattaagaatcttgaacacgttcttaaagtgggtttcatactgacggatagtcatattgaactcatccttagtcagcttaataagatcgtcttcaaagtcctcgtccaacggattacgagttaaaataacctcgataacattgaactcttctttgaattcttcccagtctttaagttcttcgaacgggtccatttcgccacgaagaaatccagagtaaacaatattactaggatacccacgatctaagatgtagacgaaattagggtctaaaaatttatataaggtctctactaaagccttatcattatcggtgcctatagaaatacacttgccgttaatcttcttaggaaaatcaataagcttaaaattagtattattaagtaacttgttaattaaagtagacttccctgagttatcagggccgtctacaacaataattttaggactcatggatgatacgccttgtatgtttcaaatgtgccatcttgaatcattttcttaaagtgatcaggacgaattgctcggtcgtcaataataaaatcataacttggtttatgtgtaagcagattatgatacttcagaccaattttttcaaggttcttgacaagtgcaggaacgacttcagtcagaattcggcccggtccacaagaggtcataccacgggccgtatacaaggttatctcgtgaccctcatcatagagcttgttaataatggccaccatttctgggtccggctcaaagttcagataatcgcggttgctattccatatcgtgattgtgttgtcgatgtcgaagcagagattcattaataggccttatagtttaagaggaggctttagcctcctcaacatcttaattacgaactaggattacccaattcgttcccactgatgggtgatgttaccaccaattggtttatattttacaccagtttctttatcaagcagttcccatttatcagggcatctggtaataatagaagctgtgatagggtctttaacttcagttacttctgtgccatcgataagtttacgtttacgaggctgacttttaagcagcacactcaactgatatagaccatgataataagcgccaatagccttaagcggattgttcttgaaatagcctgctaaagccatccaaataacagcaatccacagtttatgcttaaaggtacacataggaatatcatctaatggcattactttctcaatctcgacaaacagtctagtgccattccgagaaataccaccccatagtgggtctgcattaaatttatcgtacccatcaatagaataaagcactttggcttcatcataaatggtagggccgtattggctattaccaaaataaccacgcgggtctataattttaatatcacccgaatcagtaaacataatgttagaataatgcgggtccccatgaatcagctggtacggttctttatgctcagatagaatttctaatgcgtgttccagcagtttttctggcttacctactttaaaatcattgacatgggtaatgccttcgggtgcaaaaccttctaaaagttctttaatagaatcgttgcggattaataccttatcaagaacttccttcttaacgtccgcgtaccattgttcgtcggtaggaatatagatatcaccacctaatgattttagagcactgattactttatataccattaatacttgggtatctttggtcatcagagggtatgcatctgccatggttttaccgtagattcgttccattttaataaattcacctggtgtgaaatctacaatagtaggaataaatttcgattgtacagaattataccatttaagctctttagcttgaatttctttaccatactcattagtagggattttaatagcatgttgttctgtgaatttgagcttgttaaaatcacgattaatctcagaggttttatgtgcttcggccaatttaatcttatcgccgatgtcaatgactgactctagcttacgctcggtcatataaaccatagaatctaaattgtcggcaaggtcttcgccatagttaccttcaaaagaaccgaacccaggccatttagctacttgatacagaccaaccacaccgccgcctgtcccaatttcacgaaaatacggttcttcaaaagtgaaacgacaatctgtaccaaaggtatagcaataatcgttaccccattctactttgtggccttctgggataatgtcgcaccagttgaatagtacgttgtgtcctacgatatcatcagcaatgcaatcaatagcgtgtgcagaacctatagatacatcaacatgacgaatggtgatatcgcttattccaaccgacttcatgtatccacgaactagcccgtcaaatttactatgaattactaaaataatttcatctgactgatttttgtacaaatcaaccagatgtttaaaaactgtgtgctgtttgtagtttacaagcactttagggatttcattggtaattggatataagcgagacccaagaccggcacctaagataactactttacgcattttgtgttcctcaattgttggcggagccattatactacataataattaaagcgaagccctaaagtgattctagggcttcagccatctatactaccaccctaagatatcatctaaggtcgcgacatgttcataattgattcgggccgccgtggtaaacccagacaacggtttaacaaacgttttctggaacaaagtcgaatagtcaaggtattttaatacatcttcacgaatagcagggttaatttgggtacctgacggccatgcgatgcatttatcaccgaatgggttctggtctcgtaacggaagtaccattactttagaaccttcgacaattgcttctgcatcaggaatgtttttggttgctcggttataagctaggattccacgaatatggaacgggcacttatatcctggataaccattatcatcgtactgagcgatgttgtttgcagaactaacaccggcaatagtcatataatgctgcttacggaattcttgttcaaactctttatagtagtcttgtaatgagctttcaccttcttgaagcatacgacggatgcattctttcaacgctttctggcatgctttaggagtacttgatttctgtgtttcaagacccataattttcattttagggtctgcatagcgagtcccttccatatcatacacattcagggcataccgcttcttaccagtccagaaaccaccaagacctttagaacctaacgggggacaagcaatagcttctcggtccatgaacatcagctgttctttgttgttcatgtagtcgcacatatcttggaatgcacggccgatagccggctctaatttttctttagcaaacttatctaagaagtctactaaatggttcgtgtcacggaacttgtcttcaccaatcttctcaattaatgggtctacacacatataaattgagtctgtgtcaccatagataacatacttatggttatcggttttcaatgtttcattatagaactcgttcactcgtcgttcaatccactgcagagctaactggccgaacaatgtgattgccgttgcgttacgaagatcataataacggaagtgtacgttaccaagtgcaccataaagtgagttgataagtagcttacgacagatctgtgcagtcataccggcaacttcagtacgagttgctttatcaagcatactcaacaagatagcttcgttcaaatcatgaagctgggccctgatactttcttccatatcgaaacggtaatcaagagtgggttctggtttatcagaagagcccttcggattatgtaatgcttctttaatcagttcagcgttacgttgggcagccagcataaatcctttatgaagtttacgctggtcgaaaactttcttgatttcaaccggtacgacaccatcgatatctttacgatacatccagccgttaggagaacaagagtattcttcgctcggttttggagcagttccggcgatatattcatgaagaggtcgaacagcaaactggccgtgcaaagtttccgggcttatgttaacttgtcgaataatacttggatacagagacgtcaagtcagcagatataacgtacttgtaactattaggagtaggctctttaacatatgcacctggataactttgtggaatgtggtgctttttctgaggaatgactttattgtcgttcttcaaagagttaaagatgattgcgtcccaagtcttaatagggctgaacacagactgcatcggcattttagcataataagccatatctaacgccaggttcaagaactggcgttttttatcgatttgttgtactcgagcaacgtcgataatgttatacgaaatataccgttggtggttagtttcacgaagtttgttgataggtccgtcgtattccagtttacctacaccaagttcgtattcagctacgtagtcaagacgatacgaaggctggttcgtaaaactaaatttcttatataaatctaggtagtcaagaacactgatacccaacggtgtgataatttcacgctcatcaccaaaggtgtcagcaataattttgctattgactttacgaagtgggcttaaacgcttagcagtcttttcaccaaacacattcttcagtcgattataaacgtacgggttatcgaaactttctacgttccagcctgtcagaataacaggtgtctgctgttcccacagattcaggtattcgagaagaagttcttgttcgttatcaaatggcagataaacaactcggtcgagaatatcctgagggatttcatcaccaccttctgattcaggcttaccagctagtaccgggtcccacttagatactttaccataaggagaattcagaaggtcaaacacatagaacttatcagcaatactatcgtaatgagttaacgcatcgataggatacttggcttcattaggctttggaaattccggtgctgttacttcgatatcatagttacactggcgaactaatgccgggttaaaatgaatttcacctgggtacctgtcagacaaataggccagcttgaagtcatccatgcccattgcatcctgcccgatgtcttccattctacgaatccagttacgagcttccttcatatccgggaatcgttttttcttacaattcattccatagatatctttgtactttgattcaacatcagaatgatagaacagggttggtttataatcaatctgacgagtttgttcaaccccgttcgaatcgatgtatctctcgtgaatggtgttgcctaactgttcgatagttaaaaagaattctttcatttggttccttagacgagtaattgtcttttatttggtgaatgaattatactccaaaatgggaccgaagtcccgttgcttaatctttaactaccgatagtatacttagatttcaatgtccattcggatttctgcttaaatcctataacacggaagttattagtcatttcgtgcattaatgtacgctggcctgggacaatctcaatcagtccccagtcttcaagcagccaagcaatcgagtcacgacgctgttcatcttcttcagtcataaccacaggccggccgtccagtttcagcatttctttaaaatgaacgatgtagtacagaccttgtttctgaagaatgtgacaactctgatataataccttatcacgattattagcaatacccatacgagtaagggtttctttaaccttcagaaaatcctcaggctgttttaatgtaatttcaatcatacctaccattccaatgcttgttttttgagttgtttttgttctttcacatttttagtaatgctcttaaccatttcatccgtaacaagagctttagcttgttttaagaaagaaagtagattacctttagctaacatagtcttatggtacatgtcggcatcatagacattaattttataaaacgcctgaattactttaagtataagcattttattagaatcttcagttagtttagcccacttaccatacctcttgcctttaggaacagcgtgtttcatatagttaaagtgtgcttggtctgatagaccttgtcctactaggttcattacataaaccgctggcatgcagtcagcatgttgacttaaagcattttcaatcatgaatttgctgtagtccatttgcgacacattaatttgttgcttagtgtcattgattgcgtttattaatctaaagaactcactttcaggagattctttaaattgatctgcacatttctggactgctgaccaatccttagtcagccaggcgatttggtgctcattgtattctggttcatcatcaaaaaagaataaactcatttccactgcatctcaatagctaattgaatgaacatatacacgatatggagttcagttgaagcagccacacctttatattggttgttttcaccaataatttcatacatacgtacgatactaggccctgtgaccatagtatacagttcagacgatagcttatctacgaaccatgcataatcggcagcatattttggagccagagcacgaagagatttgatatctttatttcgaagtgcttcgataacagcttcgattgaatcagaggccttggtaacgacgttcaagatgccggcatcaataattcctttagaactataatggtccagcatattaattgtcttacgaagttctgggaagttcttagatactaaagcggccagaactttacggtcttctacaacaataccttcgttttcgcaaatagcaatacagcgtttcagcatttcacgttgcattgatttggcatcttcttcggaaggagaaccaaatgtgattacacgacaacgagactgaagtggcttgataataccgtcaaggtcgttagcagtaataatgattgaacagttgcttgaatattgttccatgaaagaacgtaagtgacgctgggcttcagccaagccgctacggtcgaattcatcgataacaatgattttctgacgaccttccatagagatagaacttgcaaatcgagttaattcgttacggacgaaatcgatcttacaatcagaaccattgacaaacaacatctcagcattaacatcatggcataatgctttagctacagtagttttgcctgttccaggtgaattactttggaggattaagtgaggaatctgccctttcttaataagagcctgaaatatttctttatcgcgagcaggaagaatacattcttcaattgtgcttggacgataacgttgttcaaacatgaactcatttttatttactgtcagcattaatattttcctcagttcagagggagccgtagctcccgtttaaattttattgaaagtcgaaagtcgaatcgatttccattgctgtgatgtaagtgtagttatcactttcaaatttagcagcagtttgtttcttaccatcagccaggtttttaccccatagcatcagtttataatcagctggaaccatcttcaagttatcacggttaataacaaagttgaagttttcagtaccatcatactcaccgagggttaatgcatacttaggtttaatcagttctgggtcttcagttttgttataagcctgcataacgatttcaccagacttattagaaatcgtaatcgtatcaagattcagaccacttgccacacgtttcagctgttgaagatcttcagctttcagttcagtgataacgtttgctaccgggaagcttgctttggctttcggtacgacgatagtagatttatcggcaccggcccaatacactgcggagcgattgctcttgattgcaatttgaccatcatcttgaagagttacttcagcatcgtcaccgaccagagacagaacacttagaaagccagacagatcatagattgccagctcgttatcgatttcatcttggattgttgcatcggcataagtcgttccaataatggaacgggtcataacaaaattacctggagtcagaacgatgccagaattgatagtagcaaagtttttcagaactgcaatggtttctttagaaaatttcattttgtacctttcaaatcattatttagagaattcagcgataacttcttcagcaacgaactggcctgcaataactagctgttcatctgcgtctacacagtagtcgtcttcaaggcgttcaccgccattacgatctacaacaatcttagcgccggctttaatagagtcggcataatgggcccgcattaattctaaccatttgtcgcttacagcagaatcaagagcttcataatatgcccagcgagcttcaggggatttgattttagctttaatagcggcttgtgtaccttcatcaagggccagtacccaagacttacgaattttgttttgattgttagggttcaaatcagtacgtacgtttttaacttggatatctttagcagtcaggatgttcataatataccttatcaattaatcgaagtattcttcaaggaaccatgcagaatgtctgttcgacattataagattgtaatctgtttctgtaaaagcatttttaatcatttgttcagtaacgatgtgttcatcaccactgaacgcgtttgtaagcctgaagcgtttcacttcaggccaggccagcaaccactggcctgtaattgcatcttcattcattccatcaccgtaaaccgaccaactttcttcatctgtagatgctggccgtaagcttgtgggtcatggtctcggtgactgataataaacacgttaacgtcagccatagtattcagtatagaacctatagattttataccttcggcatccgcagcagagtcaaaaatttcatcgaggaaaagacagtttattttaaccccggataccttttcggcaatatcacgccaggtaaacaacagggctatatcaatacgtgctttttcaccttgactaaatgacgcataactaaattcttctcgacctctagacttaatagtctcagagaactcttcattcagtgtgaatgagtaatcagcttccattactttcaaatactggttaatatgtttattaaacagtggaatatatttcttgataatagcgcctttaatgccagtatctttcagcatatcagtgagaataccgcggtgatatttttccatcactagcttagttttctcggccaccattttatctagttctacttgaagcaaagcaatctctgaagcatggtcgatgaattctgaagccgcttggtctagagcagctttaaccttcttagctttctcgaccgtagatactaacgcctgtttcttagagcgaatgtcttgggcaagagattgctgagtcctaacattagcttcatattcggcgactagcgtctccagtgactgcctgtgggcttctaaactagcggctgatgattcacattcatgaactttatccgctatcttagctacaacaggatcgcctggatgcaagatactcatacaactagggcattcaccgccagcgtggtacattttaacaactttattgaaagaatttatcttattctgtaaggttgtagttttctgctgaatctcttgcagtgcaactctagggtcttcatctaaaacaatatcagctaaacgtgtagcagatttttcaatgtcggatttaatttgacgagcttcagaagcaagatcgtcatacattgattgtaaacgagccacgttttcgccagatagtttcttttgacgctctacgttctcgttatagattttaatctgttgaatgataccttcttgacgagcgtcaatcacttggatctgagagttaatctcacggattgaactcttattcaacttatccatgtcagccaacagagatacttcaagaagatcttcgacaagttttcttcgggccggagttgatagacccataaatggcgtataaccagccgttccaagtacgacaatttgcttaaaggatgaatatgtcattccgataagctcttcgaaatatgcctggaaatcttttgaacttgcgctttcgtcaagcttatcgccgtctcgtgttatttcaaagatatttggtttctggccgcgcttaatataaaatgtgtgcccgtcgtactccatccagagttcaacaaccagattcttcttattgaatgaattaatcaattggcctttcttgatatcacggaatggcttgccaaataaagcaaatgtgatagcttcgagcatagtactcttaccaccaccatttttacccgtaattagagtcttgtggcatttatcaagttgaatatcgataggcgcttggcctaccgacataatgttttggtatttaaccctatttaacttaaaaactttcatgcgctggcctcgatataaagttgagtagctaatgctttaagagcctcaatgtcatcttgagatgtagcatcaggaagagcttcaatatattccatcatcatatcaagcaaacctactacttcttcttcctcggcttcttcggtgtcaacagagttatctactttagaaacagtgcgaagttcatgaactactttttcaagctcactttcgaaggccggcagtttatcatctactttagtaataactacacgaactgatagatttttaaattcatttgcatcaaatgggccggtgacagggtagaagattttcctgtgccaggtagtttcattagggacgaaatcaaatgtttgtagtcgagtgtcttggacccagaatccgcgtggatcgttctcgtcacctgctgtaagcgtccaaggagttccgatgtacttaacatttgctgcacttgatattgtgtggaagtgcccagaccatacatgtttgtactttttaaggaaatctggttcgaggccgtgagatttcattcctttatagaagtagaatccgttcagttcccagtggccgatacaatattcagcactagactgcttgatatggcccatgatttctgtcgtgttttcatcacacatccaaggaatcaggtcaatcaatgtaccgtcgaaatccatagtagtgggcttttcgatcaccgtgatatgcttatacttgccaagaacttcagttgctgcgttaggagtcaacgtgttcttgtagtgcatatcatggttgccaacgatagtaatcagattaataccggcttcttcaagttcattagcaatcttacgtgcaaactccatacacttgtgagtaatagccttacgaacatcaaagatatcgccatactgaattattgtatcaatcccgttctctttggcgtatttgatgtggtctctgataccctttagttggatttcttgaacccatgggtcatcagctttaacacctaagtgccagtcaccagagtggataattttcatagtcacctcttcaaataaagatattttatcatccgctcttatagcagaaaagggccgaagccctttaaattttacgatacgtgatagtaccttcagctttagctttatcgtaagctatattgaaccggctaatcatttcattcttatcgctacggatctttgcataatcaatcgccttttctaaggcttcaggagaatacatagttccattacgagttactacatttgctttagctattaccgcttccatcagccttcaccaaagccgaccttgttttctacaacaccaagatcgtctacatcatggataaagtattcagaagagtcaggttctcttaccatttataccaccttttaatttgtgtagtgtcagcccatacaagatccttcgggtcagctttattaattaccccttttgagcctagaacacggtagtgcgtttctgatattttaacagccataataccattagctatagacagagtgaatcctgcattaacctgtaaacgtttaaattttacctgcttgatcattgataatgtcccaaatgattttgcgagaggtctgccaaccggtcagaataatctcatcagtgtatggttggcgtaagatgtcacgagatttctcgatagcatacttatacgccgggaagttattgtcaagaacagctgcttgggcgtgcttatatagccgctcaagttcgcgtcggttcttacggtaaatttttttagctttaacttgcgcctgacgttctgcaatagcttgctgagccagaatcgcttcttcaatttcgtccttctcgacaccacggttttctagtgcttcagtgatgctatcaatttcagtctcggtcattttataccttaggaatgtaatcaattactacgctaaatccgtcatcagaaacattatactgatgattaattaaagcagtttcggatgtgatatccgtatcgtgtgggttcttagggtcaatgtgaatatcaagatcaagcatttcccttagatacagtttaagcaaataaggtatagcatcttggtcttgcacttcttctaaaaatccttcgaggttaattttgagcctcatataaaaattccaattcattaccttcagataccggttcactctttttatcagacccaggtgccttgtatgctgaggtttcgtattgcgtcattttatcgtagatgtcctgaataaaggtttcatctgctaacgcaaccatatcatcgtcacgactatcataaacgttgtgaacgaagtagctatatttctttgccatttctttgcgttctttcttgatacgctggacgaaggcattaaaacaagccattgtgatatatgcatgagggttggtgtatttggtttcgtcgaagttatgaagacctttaattgcggcctcaataccgtctgcaatcatttcttgcttccaagactgggtatatcctgagaagttgaatcgtttgctcagaccttcggctattaacatgatggcaagaccaatcgtgtcattttgtcgtactttaaccccttcgggggcatttctaacctgttccttccaagcacaaatagctttgtacaactccttattatttacgtaatcactcatagctggcctcatcaaatagtatatatattcattataacaaaggatgcgaagaggccgcttaaagcatattacaatttacgaagaatgcagtacatttcaaacaaacgttcacagatactaaggaactgttcgtagcttaaagaaacagatattccgttttcttgttgatattgtaccaagcctttatataagcgttggtaatggctatggttcagttcagagacatggaaattatatgaatcgtctgatgcatcgccaaacggtaaatagtaaacacccatgtagctatctacaataaaatgttcgtcattagcaattaaagttaaactattcatcgtagattccttgcgcattcatgggcctgttcaaatacaccaaaagcatcaacagaaataaacgtatcagaagatgtgtattcgtatacccaccagataccaaagtcgtcttcaatgagccagccaatgccattagatgaaccttcaattaggatccgtccatcgtctgtatgtgagattagataaccaaggtatccaagttcagctagttgttcttcagtcattaagataatcctcaagctctttaagtgtaagaccttcgtcccagcttttactcggacccgcataatcaggatggtcggcactaaacaaatagaatcggcactcgaccgggaggccgtgttctttgtacgttaaacccgatgtgcgcagattaaggtaccgttgaaccaatataatggaagcatagctatcaactaaatatggttcaccgtttcttagttctaagatacggatccgtatacgggaaggacagccgcgttggttaagaacaatcattttgccgccttaataattttcagatcctggaaacctttcttacgttgattcttcattttgcgaatgcacttatcagaaatttcgccggctttcttgacaactggttgaacaccaaaagcatcaatatcgaattcgctaatgatataacagaccaacagttcacgaatacgagctttaccaattttctgctcgttttcaaccatagttccatgaaggtctttttcccactgatctaaaatttcaggagtaacaatgccacccttcttacggatttcttctactttatcaaaagcaaaagagtgcagaacatttttgatagcctgagacatagtattttcctctgtggtttaaattttttattatccaaggaggacattatactcggtcctcacgagttcttaaactacgagtgctgccagccttcgttggctttacgagcgtagtatttgtcagttttgagttcagtttcagaatcgtagttcagtttcagacgacgtttgtcggctcgtgcatagcgattctgatcttctttaactgcagagtccaggcctttccaccgcttaggcttatcagagtggaagatgttatctgccacagtttcatcagagatgcctgctggagcctgacggcgccctgaccagtattcacctttcgatttgatatctttacgacggtatgttttacccattaaaatatttccaaatgttgattaattacactagccatatgcgaagcctcatcttcagttattttaacgccgatttctttaagcttagtttgaagatggacatactggccctttttaataaagcatacttttgaaccaatagagaattcaatttggattcggcctagttcagcagtgggccacatagtgatgaacataactttgcattcatcaacgatacaacgaataattacctttgcatcttcaattttaaccattagattaaccccaatactaaacggccgatctcttttcgctcgtaatcacacatttcaggaatcaaagcaaccgcggcattaatcgctttgccaacatgagctttagcagccatggtattgcactcagtacacttcccacgactacggaagaagattgtagaaccgcgaacctcgatcataaggtcctgagtatacccatttaaaacttcaacctgtacgtgggcggtgatgtgacgttggatttcaacagttttcaatttgtacctccactgttagtgtaggagtatactaacatgatgaaagggtgttgtaaacaccctaatcttcaattaaatctcggtcatagcctttgtcaataaggaactgttggaaatctttaagagatgggatgaactggttatctacaaagataacaggatacttgatagagagtgaagggaattggcctagacgcttagccagagattcgatgagtggtctattataaacaggcccgtcgtcaccaggacttattacgtcgataaaagtgtattcaacgttcaaagaggccaaaaggcctcttatccagtgacatccaggacatctccagacttgttctgggatgccgtagatttctatgttcatttgaaaagtttttcaagcttcttagtaagctcttccatacggcgagtcatttcttctttagaaacgcttggctgcttagtaccacgaatagcttcagcaaccataatcagagcaatggccgggaccgcaaccagagcagagaagaacagaacgatataaacgatgatgtttgctacgatatcacggaacttagtcattttaatccttattaagagaaaaagaacaggaaggaaaacatcgccgggaattcagagccgaagcgcagaacagtttcgttgccacagtcgataatgtcgttcacaaagttcataatcattttaacgatttcctcagttgttttttgaatgaagcctgaagcttcgttttagtgtcggattcattatatacaaatccggatttaagcatttcttgaatcatctcttctttactgagacggccaaattcttttgtcttgtcaatcacatactctggatggatattagctccagaataatctttttcaaggtacgccactaattctttcaaccaaactaggtagtcaatatcttgacctttcagacctgaacggttgaacttgtgtttcatcataccttcggttacgttgcacagattacaaagcaatgcacgtaccctgccagcttgaggacctgttaaagcgtggtcgtggtccaagtgattggcttgtacgtcattatctagagggcgtttacatagtggacatataccgccctgcaaatcaaacagtctttgtttttcttctttgtagagtttaccagccaataacatagattcacctcataagtagatgaatctatttattattagaacggtctgtcagaaaatctcagctgggcttcaagccactggatatgttcaatagtagctttaatcacgtttgcgtcgtaatagttatactcagcatcaaattccttttcaatacgttttaaacgatcaggcagatattgtccgtcaaagtaacctgtgctagctatagaaccaaaagattcaggtgggatttctttaatctcgtccatagagcccggagcccaaagacaccagaaagatgaatccacagaatcgatatcaataacggttccatcttccaaaataatacttttaatgcccggcttttggtccggttcttcagaaccagtacgtagaaccttgaatttgacacctactttcaactgcggaaacagcactgaagtgccgtaaccgtcttcattgtcttctttaacgatttcaaaacatttaccgatcataataataatcctctaaatcaagtagatcatttaccgtaggttcatcataacatgattcagactcggtgtaaaccggttcttcaggctcgagggtttcccaacgagcgctgtaccatggcttactcatcacgccagtagctagaaacttcaaagtcagggccgccatattcccatgaccaagggccaacaggatagtagtctacttcaccggtttctttattatagacttctttataatcagccggttcaagacccacgtattgccactgaactgtataagctacgcctttaataacaacttcgttttcgccataggcattttgaacggcccagtcgataccaagttcattagcgcgcttgaccatgaattcataaagcatccattcaaggtcttcttcacctttggcttcatttaaaacgattatttcatctttcatagcgattccataaattcacaaagttcttcacgaactacagtatcagaccaaccccattgcttagcttcatctttaatggactgaggacaatagaagaaaactgtactgaccttatggtcagtttccagttcacagttaagaaaatctactgtatctttaaattcagcgaattcttgattgttcatttgaagttccagaaagcagctataattaaagcaattggccagaacaagaagcctgcagtgaaaactgtgcctggagcagaaccgtcatctaaagcaactaaagttttgccgtagccaataccaataacaaagtaagcaataagaattaagaagactgtagtcatttataagttgctcgtagttcgtcaaaaccgccgatgtgtgtgccatcaggtgcaaaaatctgaggcatcgtcagtcctactttgctctcacgattaagacgtttaagcaggtcagcaataacatcgtcatcaaaaacacctttttcaggcatcacattaataaattcaaactgttcttttttgacagtaaggaagcgttttgcattatcgcaatacgggcagcggtgaatagttgaatcatatccgaatattgtgtacacttttctgttccttaacttgaatcatgaattctttataagcatctttatacgtgggactagcgatagcgtcccaatacgactgagtaggagtcgttttaattttcagactacgacggatttcatcatggatatctgaatgaactttattataactcttagtcaatgcagattttaatacgctgaaatcagggatctggtcgtgttcttcagaataagcgattaataaccgaacaatagctcgttcggcttcttctaggtattttttacgtttagccattataaccccgggaaagctttcttgattttctctgctacagcctgatcgatgattgaagcaaagttctgattaacacggtcaacaatgattttctcgatacgacgagtagcgtattcgattttgtattcgatatctttcattgctttatctgttgccgtcttaatcacatcactgataattgcgtcaacagcattacgtgcttctcgatcggctgcttcacgaaggcgacctttaagaacttcagaagtttcgtaaggagccccatagccacgacgactgaaccatgattcgacctctttctgaacagctgccgatacatcaggaacaactaagccgtaagcattgatttcatcttgaatcagtttacgaactttgttgcctgtatctttaacgataagatctttagcaatgttagaaataacagattgctgtaactgagaataagcttcagtgccttctgggaacagctgtcttactgcgtaggtatctaatttaatactaatcattttaatgttctctcaaatttatgtttgcaggtccgacatttcattttcagaatatcagagctccagtcaactaattgtacttgcatactactacatttttcacaaggtacaacttgttttgctgcagcttcgcgtctatcgaccatttctaaggctgctttccagtcgatttcaaaatcctcgtcatccgtgacgaggtcagctttcagttgatttctcatttaagtgcctgaattgcgcgcagaagtttaccgcgttgagtagtgatgttggtaagatgcttacgagcttcttctaccttctgttctgcttctttaaccatatcatcgagcttggatactacttcaagcatctgggaagcaaagtgccgttcggccgggactaattcaggctgagcgacagtagcaataaaggatttgtctaatgcgtacttagatgaggtgacttcaccgtttaaaacttcttcatcgaactctttaacaggcttagtatctttcaggaatactaagaaagtgccactatgcccgttagctggtttccattcataagaagaaacgctaggaataatgcacagagcctgtgcaacctgctctttaacaacggtcagcgtacgaaaatctttatgtgctttgtctttgttgatacgaatatcaatgcagactgagttagtcaggccaagcatagaaggacgcttagcaatcacttgaatagttttctggtgatcgaacagttgatggcggttagtattacgtaacgtttttgaagcaagcttcaaaataaggtcacggtcgtagttgaattggccaatgaagtaatcaacctggttagtgataacggcttcaccaccacgatattctgctgtacgcagatcataacgttggcgagcgcttgaaacagtgccgaaattaccgaggcgtttacgagccatgatattagacaggatacgagagtgcttaaagaattctttgaagtcgtaatggtgactaaagcctgtacgccacttacggctctgagatgagttaaacagatgagtaaaatcaccgaactcattcttcaggcgattagtcaggacttcgatacgttttgctttagggaaccctaccgtttcagcctgggtattaataaagatttcgtgtgctttttcaataacttcgttacgggtcatgctattttcctcaaaatattttacgaattaaagctaacagcggcagtcctgcaatagctactacccagaacacagaaaagataggccagaatgttacaatccatgctatctcagtgtcttcagtgacgtcatcatagataccggtccagcctgacgtagcaatgaacagcttcgtcatcaggattcctatcataacatagcagaatacacaaagtaaaccaaataaaatttccattcttttttcaccgagtatagagtgtaatggaaacatccatgaaaccattataccaacctttattttaaagcaaaaagtccgttatcgatattacgaagctgggcctgcttgtaactgtacacagcctctttaagttgtgcattagacactttaagatggtcgttgtaccacttgttcagatcttggtgcttcttgaacactgtctgaagcttgttattggcttcgataagagccgcttgtaaatcatcaaagtatttttcaattacttctcgtttaacagagccgtcatagttagtagaacataaaacactggtatggcgccagagctccctgagttcacccaggacgtttttgtctttaccccaattaaacttatacagatcttcacaaatggcctctgcctgcttctcttgctttcctttaggcattcctgcgtagatgtatgccggtgggtacaaagcagtggtttcgatccagttagataaaataatcatttgcgcttctccatgaaacgatagacgccgccgaacgggaatgttacgattttaatgaatgattcaaaaatacccaaaataacaggagcaggccaaagggctatcactatcttgaaatcatgctctgtatcagtcattgtgtgaccacgtaacttcatgcagcaggcaacaatattaccgataacaaggtagccaatgaaggctaccagaacccatactactatttccatcagattttcaccttagttggtcgtttgaagaatgcgtgagttttatcatcacgggcctgttcgaatgtagcactgaattcgatttcaccacgatggtccagtggtacacatttcggcaatgttccgtagacagtggatttgttttctaacactacagtcatcttagaaacaataccgtagtaatcttcgaaggtcttaacagatacaacacgtccttttactacctgtttgccaacaggagcttcgcctttgtcctgtttcatactctcgaataggttattaaaccattcattagagtatgcctggatcgctttcaggatgtcctgatgagctcgtactttaaccattagaacttcggtattcgtctgttccatagtccaacgcttataaggagtctggaactgaataccatagatcccgaagatctcgtcgtacatttcttgtgttaaacgaagcttccaccatccatggtcacctgtgtattcaggtttatccatgttatcaaattcagacacatacggaagatagcttcctgcatggtaggcttcaacttcacccagttcgttttcccacaagtatccatcgaacggtgcatgtgggcggtcatcaactccccaagtaggtgcaacgactttatcgaatccgtcacgtccgaagcgggacttgcaccaaccagcattcaactcctcggcgcgtttttcaactttcgctcggtgtgcttggcgggctttacgattttcttcaataatgttcattacgatttcgtttaacatttttgcatctccgtgttggtgtaagatgatagtatcaccatcctacacccttgtaaactacctttttagacaccgtaagaaaattagtggccagcctaaaacaacactgataaaggttaaaattgacttaagttgactttgcttgccataagcccaccagattttagtatacaaattaaacccgtaccataagtacactgaacatagtacaacagctgcacacaaacttaaaatgagttccataatttacaccactgttaagatataccagcaccaaaggggccaaaataggataatcaaaatgttcttcggtagacgttctactgcagtccgacctttgacccagccggatgtcattatcgctattacgcagccggcggccatccacacaaccaagaacagactcgctaaagctaaacctagaggagtaaacatcagcggtctccggtgaaccaaacagatttgtgcgcgttaagttgtttttcgttcatcttggctttaatctctgtatccagctgagataaagcttctttgaagtcttttgctgcttggagctggtcgtgatccataataataagatgaattgctttagatttcaagatgcttcgctttttgaagcccactgcaccgctagggaacatccctacataacggtaagccaggtttacagcctgggcatacttgatcgcggccttaatcatatcagatgcaaaagcatcgcggattttaagatattttcttgcgtaactcatttgtagaactccaatactaagtactatgctttcctttccatgatgtagcaataagggtcgtcaatgtccatacggagccagaatacaccgagctgaatatttccaggatccgatgtcttagagcctgtacaacgaccacggtctcgacgagaatatctatggtggccattttcgtccatcacagtttcatagccagtacgcttttctttaacgtcaaggtctttaaactcaacgattttaactttcttaccttcgagagtttcgtaggtatggcctacttcaaaataagaatgctgaccgcctgagaccatcacgataacatcttcaacgttctgttctgggaaagatacaccgttggtctggccgtgctggaacacagcttggtattcgttttcagcgctgatagaaactttacggaacttaccgtcccatacaccatcaacgaaacgtttgaattttatttcatatacgtataatttcataggttcctcacataacggtaaagtctgattcctggagtgtgtagcaacgccctgtggctttttcaagaaaagtgtaatacattacaccatctacctcacgttgatcctggagctcacctataatcttattagggccaaagcaccacataatagctttcatattcacctctttgtttgcgtagatctctatagtatcatggcctacgaggatgtaaacacctaaacgaaaaaaggctcccgaaggagccttaccttttatttgaaagggcgaggacccttcggaagatgctttttgatttgatgctcagccaaattaatcggaatagaaattagccacccgatagcgtggtagaagccagaccagataacaataggaagccagaacagaacgtatgtccaccaccctaaagaagattcgatgtagttagtagcaaccatcttattagcgatgatggacccaattacaaggtatacaacagcaatcacaataggcatagcaatccaaaataagctcataatatttcctcttgtgtggtagaagtctatactaccacacgttaaaacactgtaaactaccgataataagcctggtggttttcaagataaactttctcaacgaaatcgttccagaaagacatgtctactttatcacgcattccattcttatgagcaatagctgctaaacgttcaacttggtcaactgtgtcttccaaaagttcttgaacgtatttgaatggcaatttaccggctttgatttctttaatcaaatctgctgatgataacgggaacaccaaatcgccggtgtggtaaatttcacgtagctgagcacccgcccgatatgcatggctcagagctttccagtcaacaccttcgttagcttctgccttacgggcccgttcaccatattcagtctcaagcttagtcaggctgtacttgatttcagcaatagtgattgtatcttgaaacttacgacccagaacgttatagaacctttgaacacccattttagagtcaacgtcgtctttccagaacaagaattctgatgtaggcaaaaggtgttcaatttcgcctagtttccagcgttggttatgggctttatctttaggccgatcagcgtatttccattctgggtattggttcagaacttctagtacccgcttaagttcagctaatcgagagccctttacaccatacttagcggcttgcttacggacataccctaaatatgacttcatgtctgtagtatagaaccgagagcggttctcttggatgaatttccagacttcaggcaaatcagatttaacaaccaggtctgacggagtgtgcagcatatcaagtgctacagtttctccggactgggctagttcaaagaagtatttcaggctataaagctcgtggtcaacatcatcacgagtgttcttagtagccgtgttgttagtgttcatgttaaagtgattcggcgctcgccccattagaatatcacgaggatgcggaacgaagatttctttgaaatcgacatcactttccggagtagaggtcccataaagatgagacccaaagtaagcttttacgactgttttcaatctggtgtaccccaacgaagaccatggaatttttcaatcatacacttgtcactgaagttaatctgcagaccgccgccggtaggagtgcttgcaaacatagtttgaccattagaactaatagctaagatttcaaacgtgtcaccggatttaactaatgaatcacccacttcaaccgggacccaggtgtattgttcacccgcgcgattatagctaaggtctttaggactgacttcttcacggaagttacgagccgtccgatgcatacatttaacacggtggcaagatactttatattcagtaaagatcgcaatttcgcagtatccagtattacttcctttaactagataccgagcacctgattcagccaggaaaatattataagtcccgtggctgttaaaagagataaagtcaacattacattcgattttatagccgtcttcagtaagaatctcaagagaatcctggcgggccaaagtatctttcagttggactttagatttaacctgtttaataaacatattaacctcgtttaccttgatgccattggccgtcgaaataaatgtctaaatcgaatggcttatcgttttcaacatactgctcggaagagatagtattatagattactttaagcacttcgccggtatctttaaagacaaatacagcggcaggaaaatagaacatagcggttttaactacagaggcattaaaaacggcctctcggccgtttactacataagtttgatcgtttttcatttgaactcgataaaatgacaagttttgtctttaaatgatttatatgcagtcttaataaaacccggcttaggtttaacatacgtaccatttgcacgggcttcatattcttcggcttctttacgagatctacgcttttcgtaaagataccaaatacaataaacaggactaccgataagtccaagaattaacacaatcgccatcaggccagttaatgttgccggcagaagcataaacccagccgagctaataccaagtgcagcgaaaatacttacacctgtagaaccgaaccatagaagtaagcatgcggctaaagcaataaacactagaagaagccagaggacttgtctaacgtagccgcaaaggtctcgcttaggagaatccaacatagaattaaccatcttatagtgccaagagtcgcgtttgataatcatttttatttgtccatagttggaataacggagttcagataagcaacaagtgcctgtgcttcagctttagtaaaggtgacccagttaagttcatcttccttttcatcatactgcttcacatgaacaacgtcacactgaatctctgaaaaattagaagtaggaaataccgacagctctgtgtcagcttcgcctggaaaatcagattcaattttagctgctgaagatgatgacgggtactgccactttaataaactcatttctatttcctcgtttgtttgtgtaggaatactataccaaggtattatcagcttgtaaactctctgctgtacgcatcattacttcggcccatgcggcagcattacttttgcgaacgatacgaacactggccggttggctatcagtatctttaacaaatcgttcttgatgatatttcaagatagcttcagggtgatataccatatacattaaacttcctgtagcgccgcggtactggcagatttctacagattcatcgcctgtgtaagtacgggttaaaatcaaatccccaacttcaagtttaccgatgctcatctcatgctcctgtgccagcagttgcgtggctcacgtttaaaaatttcatcgttcatctcttgacaacggatacaatatatcacacctttaatcgcttggcgacgcgcttcaggaataggctcttcgcactcaaaacaccgataaagcgattcgcgctcagtattaaattgcgaacgagcgtgaactactgcagcctgtataacagcagcgatttcatcttgctcagcgccgtctttagcaaatccaacagccattataaccccttaagtattcgaaaagttctttgaatttggttaaagcctttctacaatttcgttaacacgtttctgaactttttccatacgagccttatgctctaaagccggaaacgtaggagtaactgcagcgccaaacagaacggaagcttctttaagctcgaagatagctttaattagttctgcttttacagaggaatttaccatattcatttcaccgtacttacgaaatgtactaatcataatgttctcctcatgttcatgtaaggatatactaacacgttcttacatcgttgtaaaccccctaaagggaccaaaaaggtccacttaagatttaatctaatgaaagcaaatatttagtttgatagcaaagagcgttaatttcatcaatgatgtttttaatagccccaggcatagtttcatagattcgctctgattcacttatgatgtgatcaagcatctttattgtatcaggtgggagatctttttgagaagggatggcaggagagtatttctttccagaaaaccctagccaagtttctccaaaagaatcagttaaagccggaatcttgctaaaaaagttatcatatgctttatgacgcgagtaacttttggtttcaaaatgcgccgaatgaaaatacgacgcagaagccattaaaagacctaaataattatccgcttcattaggtttaccggctgttacaaactcattgaacttcatggtctaatggtatcctcatttgagatgcatactgtagtccggcattgatgccagtaatggagcattcacttgtacaatttacagtcgaccacttgtttttaataaagctatagaactgctctgactcttgtttacttggtttttggaactgggcgtaaacctttaaagcgccttcaacgtattgattaaattcttctgttcctgtcgctacgacaggaagactaatgcaaacacctaaggcgagacaaagtgagtgtttaaaggccataaggcctcctatttttgaccagtattacgtttatgctgtaaaacagccttaactgcatcgaggtatctttcgtgagaacgcatacgcttatagtccgcttcagaatcagtttctttataagaaacacgaagtgctgaaatagcgtgtccaacctcaactcgaatttcatctaattgagaagtagtcaaattgcggagctgcttatgtgacaaatgcttcatatacacctcttgagttagtttacaaacgtatttatcagctaaaaattaccttgcatttacatttaggacattccggctctttattcttaagacgcttagttgcagtcttaggcgccttattatagtcatagacgtgtagacaacggtagcatattacccatttcatactattttccagtcactaattcgaaccaatgtttacgacaaagagaaacatatcggtcttcgccgcctaattcaatcttatcaccttctagtacagcattaccttcttcatcaatacgtgcgaccatcgttgctttacgaccacagtgacagacgcctttcagttctactaacttatcggcaactgctaataatgtttctgaaccttcaaataagttaccctggaaatctgtacggagtccatatgccatcacaggaacattgtactggtcgacaattttacacagttctatcacgtggtgtctagttaagaactgggcttcatcgacaaatacacagtgtatatcacgctgtgtctgggcccatttaaagaattcgaatatatccatatcaggagtaatgatattcgcttcctgtctgagcccgagtctagatacaacttcagtagatgaatcacggccgtcaacagaaggcttaagaatcaatgtacccataccacgttctttgtagttatgggccgccgtcaacaggttggcggacttaccggcattcattgatgcatagttaaagtatagctgagccattatttaccgtcccaatctactacgatgatattagtatgatcagtgaacatattaataatcgtttctattttagcccaatcaccaccagcgataccggctccaatccgaggaatataaactgtcagaggagtgatctgattttcagatatcatatcaagacgtctgaaagcgttcaacaaagccccgtaatctagattccgaccaggattatattgagtatataagttgaagcaataagctgttccttcgggccggctatttgttgctatagtaataaaaccaagcttttctcgatcgccaagtttagtttcgcggatatcggcttctaatacttgcgggaaggctttagccagctgtccagctataccagcgcccatttgatgatggcaattacagccatgcgcgatatgatgtcctgttttaaacagttctacgatattgccggggatgtattgggttatcatttagagtttaaacctctattatatgagtcgactaaacggtcgaccatagattcacatatttctttatacttatcatcagaaggaatacactctgtggtaagcagcctattttcataacgatctgaaagagaattttcacggaaccgagatctcgaatccatttgaccgtctttaaaggccataatgacttgattagagaactctgttatacattgaacgttttttggcgaacagtagtctttagctgtcctatgtgcatattcaaggattctggatttatcggtactctgtgccgcattaactcccaaacataaaaataacccaagagctaaagatatttttttcatatcttatccactaattagaatctcatgcgatttaagataattcgccttttctataacttgggaggcgtacttattacctgcctttacattccaacccgcattataactagagatagctttacgcatgtccccgttatgtatatttaaccaatagctcagctcaatatacgcccagcgggcagaatgcttgcgatctgatagcattcttttgatttctgtatcagaaaggttccagttattttgtgcagctctattacggactgtaggcaagtaattttgaaatatcccataagcatggtgcttctttttgttcttgccagtattagcgcctgcacttgactcttgccaagctatagcggccataatgtatccaagtcctttcttatcacgcgtttcgtgagttttatacttgccgtccttagtgaattgctccccgaattgatatgcgtaatgcaaattatcgagttggacattactgaagtggtgctcagcactaaaaacagatgcagaaagcatcgtaagtgctagtatcgcttttttcatgttttcctcttaaagattaataacgtatgtgctgattttaccttttaaacgtttattgttaacgaaagccatgcggcatttcaaggaataccaccggcccgggatatggttatccacagtcatgcccaaccataaggttccatcggtgacttcaagcctctgaggacggtatactacattaggatcgatgtcagctatatcgattggcagtggtggtaatttcaagaattctgagatctcttcgacatgaagatgaatctttttgaagagagcgaatacatactcttcatcgatatcgcgttggatagcacggtccaacagatgattagagtatttaataaagaaaggttgaactccggccttaatagcggcggacttcacagaagagttgatgtctttgaaagtggtttcaaagatacgacggagcttattacggcggatgaaaacgcttgaatcgatgttagtcattttattttcctctcagttggtgtaagaatactataccatactcttacaccattgtaaacctttagtacttctcttctgggcggaataccgctcggcaggcccacatagaagcttctttaagacgatctttagcaagcacgatagcatttagtgcttgaacatctgcattaaaatcttcgtcactttggcctgggacgtgttcacgcaattcgtcttcgatggccgagaaaatcaacccaagacggacctcggcatctttgatggcattaacacgattaatcttttctgtagtatgcggtttgtaacctttgatgtcttcaacggccataaggaatttcctcgtcggtttctttgtcgtattcgactaactcaatttctgtagagtagccacgagtaccaaggtatgaagttgcttcttcatacttcatagtttctgggttccagtcgctagcccaggcttccataagcccttgctctccactgttactgaaccagtcacaaaaggctttaatagccttgtctgaacctttaataataacctgtgccatgttaaccagtggttgtatagcggatagaaatgtctaatttgataggttctttaaacaattcgattgctcgaataagtttgcggtcgtagcaaatcaggctgcgtgataccaggccacaaagaggcccagtaacaaatatgatttcaatatctggcttagaatttagctcttcaatagtagcttctgtttgaataacagactgtttaaaaggaccatccataaacatataacgaaccattactgaatccccaaaacgaaaaataaaggtaatttaggcttatttgtagagtaacatgctttgagatcgtcccaggcttcatagaacttgtacatttctgggatacgaataggttcttcaactataaacaaagttcgcttaagcgaaacacctcggaacttatcttttccgcctaggaaactgcgtacagtatcatgcattagtacgccattttctttatcgaagctttctaaaactttccaacgacgtttaatacggtcacaagtatctcgagcgtattcgcttttgtttgcaatgacaataacagaattaccttctgagagccagtctgcagcaaattgagagaccgcttcagttttacctgtttgacggccaccatcaagacgcagtgttccatattcttgaagcatggcaatagggtactgccatgaattttctgggttatctaaacgactgattgcatggtctgcaaaagcatgcatcagagatagatattgagctgttaagtatttcatattatttccaaagttgtgggccagtccttggctctgcgtagtccatatagtatttctaataagttagacgataatacttaaacgtattctcggccacctttaagggtgttcattcgtactttggcttgagggccgtcatggcttaaatcataagcacgcattacaccccaagactttttaattttagccaaagaacctttagatacagtaataataaaattatcactgcctttggtccattcaactgaatctacttgcacgccttccttacgaagatttgacacaatagcatcgacgaattctttatccaaatttccttgagtacagatctggaatacttttggctctttttgagcttttgcttcagtgataaattctttataagttttcattttatatcctagaatggtaaagttttaaatttaaatggggccattccttggcacatgtttaatccatcgacacagtatgtaaaccccttaccgcacttgcgctcgaccttattacaggtagggaaagctacttcactcagaggacacgacgttcatgaggagaggtcctgttcagctttattaggaattacgggccgcattagcaacggcgtaggcgtactgaatattagcgtctttaaacgtacctttagtggtatctagatctgccttaaatccgcctttagccataacctcagcgaattctttacggaagtccatggcgtcaagatttttccaggctgccttatgcttggcgaattcaagaccggcgaagttgacagccttagccaatttattgtcaataacccatttgccagctttaggcacaaataccgggcctttctgtttggagaacagttttaaattccaacggcggaggtctgcatcggctttaacaaaagctgcgtccaagttactagcaacaatatcttgaatatggccaaatttaagcccatcagcttcaatatttagatcgttacgccagcgaagtccttcccaagcaaagcttttaaagtcagaagcctttgtagctaaataccgctcaataggagctgttttagggtcaaagccgtttcctcggtaggtccactcatctttattaatgccattgacctttcctgcagaagcttcagcgataaattctttatatgttttcattttatatcctttaagttgatagaagcattctatcaaagcttatcttagttgtaaatagccttaccataatgtttataccactgaggcctttgtgcaattttttcatctaaacgagcctgacttaaagcgatgtcagcttcagatggagtaaaatcattcattagatataacgggatatccgatacgtcaacatgggtattttgaatttggaacccacgctttaaaagttcctcgataatagcattttgtcgtaagaacaaaaagccaattttatcatagaagaacttaacgtgaccagcaccaagacggaaatccttaggaatatcgttgaatccctggcctttagccagacgatcacgaacagcgccaaagatgcgcggtagttcacgatactcagccatcaggtgttgatcagcgagttcagaaacaagagttaagttaatacgggtcatagtagcctccattaagtttgtaaggctactatatcacagttatcgtggaagtaaactactatttacctttaattgctttagctgcttcgatagccgcttgctgaaggtcatccatagacataccgaacttagaagcaaagttatcaattttcttttcgacagaattcaaaggcttggcctgtttaccttcattagcgccagggagagcgagaatacgctctttctcaatataaaggcttacaagtttcttacggtctttatcgggcaaatcatgaaatgaatgggcctttttatttatagcggcttctaatttacctgcacctactcgtgcttcggtgataaattctttataggttttcatttttatcctttaagttaatacgtgtcatagtagcctccattaagtttgtaaggctactatatcatagttactagaagtaaaactttatttataggttttcatccagttcttgaacaaggccgcaacatctttctctttaacgttcagtttaacatctagcattttgccaccagccgcacgggtctggcggattttggctgtaccggtgtcaccgttccactcgacatagtattgcccagtgttcattgcgataccatcgccaaaatcctcgttcttagaagtggtaaaagataacttcattgtcttggcaacacgggcctgcataccggtttgaagtgcattacgaacacggatgacttgaggagtagctgtagtcagggtttcgttcagttcttcggttgattcttcttcgaacatggcaagaagttcagtagaagccggtacattagcctcggcgataaattctttataggttttcatatgctttccaagttcctgttttaaacgtcgcgataacgcgttttgctctgttaggagtctgattataccatcgggatttggctaaattaactgctgcatcatcccaacgtttctctttaagcatacgcaaagaattggtgaaccctgcgacgccggtaacgcccatttggaagaccatattaattaatgccgctttacgtacagcatcaagagattcatatacaggcttcagaactgggttgcctaagataccacgagtggctttgtctactgaattcaagaacaatttctctgcttcagcacgagtgataacgccattacacttacggccgattaatttatcaagctcagctttagcaacattaatatctgggctcttggttaagagctggccgataccgatagtatagtacccttcggtgtctttataaattttgttgtcgtacccttcatcgatacgaagcatttcaaaaatgtccataggacctcctatctattgataggagtatttatcacgctacgctaggatacagtttctgcataataagataaagagacggtcccattacgtgtttccacatctcaggtttaatacaagcaaatgcatccatttctggaatcatcgtaccatcttcaaaggtatgataagcggtgcatttgcaatttctgaagctctcgatgtccacgaagcgcatataactaaatagatgaatatttttattccgagcgtattcgtgctcacctaggtcgtacagggcttcaggattaaagtctgtgaacccagtttcttctcggcattcacggatcgccgcttctttaggagattcgcctggttctacatgtcctttaggaatgtcccatcgagaacttccgtctttacgcttaatgcctgtcatacgagccatgaacaggcgatgatctttagtaaagaacataatcccggcgcttaattctttcattcaaaataatccttcacgttaaattcgccatcataaaggccataatgaatagccttcaacacatcgtacatgtcatagtacttttcacgtttcagagtaccataatacttttctttaatggtatcccattcgccaagccttccacttgctaactggcctggctggatacctagttcaatgaacttcaggattttaaatccaacttcttgatgcgaaggaggaacccagccccagttaaagtagattcgtcctgtttcctggccatctttaaatgaaatcaaatagcttggagcactcattttctacaccctttgacccagttcataaagttacgttcttcaacatatttcttgtattttttcgcgtatatcttatcaagaataattgtgaaaagatgtacaagaatagcagctactagtggaaatactaaaatactaatcgctgtaacaaatacccatacaagcggaattgggctaaataggctgtacaggcctagtgctcccaggttaataaaaacaagaacaaaaccaatcttaaatcctgcctcatcatcgtcaatccaagtacgtgggcgacggctactcattgcattcattttcggcatcctttaatccagtttgcgaactcagcgtctttagcttgctgctgcttaagtttgtcgtgcttggtttttctgaacccagcgatgattctggcaataccgcatcctatagcgccgccgatcaataatccgctaagagtacccataacactcactaaaacagaaagcaaaaccagttccagtgctgtaaaaacggtccaattgcagtaaagaaataaagatacagttaaaaacggtcctataaaactaccaactttagagcaattatctacaaaggtctgaggatattctacactatattctttgtattcggccatttctttcaagactccagtcattcttgggtcaatatgtcggacgccaacagcgtccttatcatactcgttacgatagagtgtcattaccaaccttccatagggaactcaagataaacctgcgcgttcactcgaatttcattggtaatctttttgactcggtctgtattacgagagactctaccgaaccagcgccaaccgttaagaacagctttcgaaccagtgtgccacgtttcatggttaaattcaagcagagtacggtctggggcttcccactgcttgagagttccttcttcaatgtgacgaagtacttctgggtgccaatgcttataaattgtttttccttcaggcacttcagagaatgtagccaccccggtagcaaaatgagtaggacacacgtcagcgttaacaagcccaataatatgttcagaaaggtaacgagggttgtcataatcaggttgacctgcagttaagaaatgttgacctgccggaatatcaggacgcggtacgtcatcatgatgataacctgggatagcaggataccagccaggcatcagcatatggatgcgggtatcgataaccacttcatcatatcgccaatcgacaggaagattatcgataaagctacgagtgatagggccgccgtgtttccaggcaaaagccaaatcacagttaaagaacattgtttcatttttgatcacttcgttagtgatacccatagcgaaacgacctacatctcgggcttggctgttaaaagtttttggtccgttcataatatttttctctcagtttgtgtaagagtatagtaccatgctcttacacagatgtaaacatctatctcagctcttttgcaaaattcaaagcgagttcacgttctctaatagctagttcacgttctttgagctctagctctttcttacgggtcttgcggtcttccttatcaagccttgtgcctttactagtcattttaccactagcttccaatttaagatgatggcaccagcgtagtacccagtaaacaacagtgcatgctactacacagaggctaataaaccagatctgcggcaacaataatgttgtaaaaataataagtccgttaaatgttaaagcgccaaagactactgaagtaaacgccataactaacaggtagaaaaagaacttttcagatttccatatataactgctattagtccagtacaaatacaatgctttagtaatcatcttgggctctgccgtgaaattttattggcctggcagtagcgaacatgctctacaaagtagttgttgctactgtacttgattctaatgacctgtccacacttagggcaggtcttttctgtaaaaggcttaggcttcatttttgaaacggcttaatcatatgttcgtttttgtgaaaacgatcaatatagtcatttacacctagagttttgtacatatggactactttatggtagttttcccaggcgtattcacggaaccagcctgaagtaatagaagtacatactttctcaagggccatcataaagctatgctcagaacttacattccgaaagttattcgggatctgggaacgctccagcgccaagacacatgtttcttcgtaaacgccagccagtttaatagcttcaggcagtgcttcgaacttctcgcgagaagtcatgacttcagagccatctttcatgtagaaagtataagcaggacggtctgccagagctacagcgcggtggatgctgtcgtggtcaaacgtgtaaatggtatcattaaagaacgtcgatttattcacatccagtttagggtggctgtagttcaacgtttctttctggcgaaggagcataatctcttccataactggagagagtttaacccctttattacgcaagaagcgaatatgatgcatcgttttacggaagaatggattgttctttttgaaacgatgactcattttgatagccaaacacatctctggagtagcccagtggaatccagagatgttatcttttgtgaggaattcttcagaataacgcaagagctcaaagtttgaagtaaaatcttcaggaagaagtttattaacttcctggcgaatccgagtaatagcaggaacgatatatgcttcaaagtgagtttcacgcccggtatgcatacatttgaatgcacgtacatccggattattgactgctacttcaatgcctaacatttgagccttaaaagcattccaagaaccttggtcggcgatgaagtcccagtccgagtttttaatatcgtcataagagatcaggccgtggtgctctagagcgcgagaaccgattactagcatcataatattttcctcaattagtttacaggagcattatactgatttttaagacggttgtaaactcttttacgacataaatctaaaaacatttcatgctctgatggtggttctttccatcgttgttcttcaaagtcgtagattagaaaaggaagagatgtaccacgccgtataggatactggtcgtgcatatcatacagaagtttacgtcctatagacatatgttctaaggctcttgaaatctctccggcccagttgaacaaatgtaggcctacgttatgatgcttatctctttcccaccaatggatgtacccgttattatggaacggggtttgagtttcgatacagtaatcaacaatcaagtgagctactctgccagccaaggattgaaatgttattgtagcctacttgaacagcactatgaatagtgaggccactacgatcgtcgaagtagatatcgacactttcattttcttctgcacaaatctggaacaggttctccagagcggctttagccgtacgtacggcacagtctaattcacgagacatgtttacctctacagtatttgatgaagctgttaatttccgcttcagtaattttttgattgttttctacaacccattcgccgtcaataaatttagcgtttggaaaagtaaaaccatctaattcgtcgatgagcttatcgtaaagatacgctgcggcttttacattttgagccaccgtatgctgggtatataagtgctgtagatatcctacagaacaagtacttaaaaatccatgctcattttcataatgcaaataacaatctttaacgaaaatactcataactcctcctgtaagggccactataacatgacccttagtgaatgtaaactagcagttctgcatagagctggaataccagaagcctttatcgtgaggcagatagttatcttcacgaatccacttatagctttcccattcttcagaggttgcagggatatactcttcattaccggcacagaaatgctcaccggttgcttctgccatagcttcaccttcagagatcagtttagaaatggcctgttcaacatctcgaacggtcccaagcttaaattctgctttaatcattctggttccttaacaagagctaggatgccaaatacgaccatccgcttctacgttaaattcacggccggcttcttcaccgtagcaagagctattcagccaatcttcgaaacgaatagaaccttcgtagacgtcaaattcaataccaaagttctgttcactagccattttagaaaccttgttatacaggatcgccagttcttttgctgctgcttctaattcggttatagtactcattttaacattccatagatgaagagacccaaccacctgtttcaaggctcgtgtagtactcgtgttgattaacggtagcccatgaaggattaccttgttcagtgtactgctcaagttctttcttcaagaaccctggtgaataatacgtaccgcccatgccgtaggcaggtctaatagaaaattcagtattataacggtctgctacaactttagcgtgtcgaattgcctcattaatagcttcaaccgctttagccatttcttctttaggatttcgtttcatcagcacatatcgctggatgatacccaagcgccttcaactgtattaccgttttcgtcaaggtctacgtcatagcaccggcagtagtatccaagaccgtagtcttcagcattagtgcctttaggataataagtacgaccgttcccgtaatcgcctgtactaaatgatacacccattttatcagcgatggcttctgcttcagcttcgatatgatcggtcaggcccatgagcgcatcgatagctgctcgtgctgacttacaatcattgtattcaggaacttctacttcaaaagtgtatttactcattttctgatctctttcaagaaagctaacgtttcatctctggaatcaagaaggcgctgttctgcattttctttttcccactcttttacttcttttcggtaattatacatgtgttttaatttagcacagccgttaatgatatacggtatcgccataataggaaatccgaaagaaaacccggttactatcatgatcaaaattgatagtacagacatctcggcgcccatttcattaatcatgaacgccggataaaatatcatagcgcacagacctatagtaattcctatcagtataaacaagaacttgtctgtaattaccttggtataaccccagtcaatgggtttattgcgatagtatctagccatttactgcctcacgacaatatttgatgaactcttctacaacgatctgctttgctagcccagggttctggctgaactcatagatctctggcgacaacacggttctaagataagtacgccgttcactataatatccatgttcaggcatattagtataattaggattgcaaagtaaagaaaccgtgtaaattttaccttcaatcataaactctaggacaaaagcaaaaaggtcctcgtttttagataaaaactttgccttatctcttgcataagagaaccagtgctcattatcatcgttgtacgcgtagatgctgtattcaagttggtagataccttcaatacgagcgccattatagcgccggctgaattctagcacgatttctttgataaacttagtattggccagcataatagcaggcggatactttttgttgttatggctaccgcgggtctgcaaaaaattattttcagaacaacgttcttgcatatatggcatcaaaagctcgatagctttttccggaatacctttttcacgcagtgcttcaatttgtaatcttttagacatagtattatcctctattatcccaacaagagggccgaagccctctttatattacttcagagaagccagatattcttggacatctgcagtagtagtggtagtaccaggctcagcaccattaaaggtttcaaccttcatagtgatatcgtccacagatactttagccagagaagccagttcgatcacatcgtcggcagagctaatacccaggtcagcagcggaacgggtttcacggatgtattcgagcttaacagccagatccagacgtgcgtcatccagctcaactactttacgttcgatttcttcacgcatggctgcatagccggccgctttttcacgcagggccgcagcagttcgacgatacagaaggcccaatttagcgtgggtttccacgttcatgttttcagacagcagacgacgaatttctttttctttagattcggccagtttgtctttttcgatagccagagccaagatacgtttctcttcgttaacagatttaacatgagaaacacgaagctgagtgattttgtcaatcaggatattcgccgcttcagtatactgatcttcgatagtagtatttttagcaacgaaggtacccagtttagcacggatgaatgcaaccagttttttcagaatagccattgtattttcctttcagtgtgtaaaatttaaattatccgtttgtgtaggagatcataacatagctcctacacattgtaaactacttgtatgttttgataatttcttccatgaaatctaatacagcggtttcaataatgcgagacagagctggatcaccgccataagtttgcatagtagacaaaatgatattttccattgcacgtaaagctgataagcgttcttctccagatggaaagttaggagtttcgccgaacagtcgagcaaaagaactaaaatacgtttgtgctgcagctttagctttatcagggtaatgcattatgttttcctcagattttagttttgacaaaagctacataggcggcagcttttttaccggcaattttcttctgacgtttagtaccgataacattcattttaacagtaggagagtcggtttcaacatcccacacgtgaatgtaggttttagcttcttcacaaaagaacatagcgtgagaagagatagtaccaaaagctttagtgaaatgaaacattttattctccagtaagtctgtatcgttttgatgagtctataataccacagctactggagaagtaaacactttatttcacgtttttgtagataaattcttcaagagcttctgtgatggcttcatctacgtaaacatcaaacagagcatcgctgtacccgtcttcatcttcccaagaagcggcaccagcgcggaagccttccatacatgctttccaggcgctttggtataatggttctgaacagtttcttacaatcaggtcagcgtattgcaggacccaagaagctggtagaaattcagtcacttcgttaaagtctataaaatcttgactctcgaagagagatgctgggaacccagcagtaatattacgtctcatgatttcaccttgataaattcaatgcgttcaatttcgtcccagttcactttaacacttccaattaactgagcacgttcttcttcacgtgcagtccagtttgcacaagcaaagtaacgagaaccatcttctagttgcccaatcactgcctcagagtacccgccttctttccagtgaattaaacaacaccctaacgggatttcgcgttcagaatcagtttcgaaagttttagtaattttcattctacttcctcagagtcagcccagaattcatcgacagtatacgtttcatcgttatcagcaataaagaagcctttagaagaatcaacagtatctacagcattatagatgtctgattccgagacgcgaatcagttgctgcccactaggtaatacaaatgtctcgccatctttaagatctttaaaaagtttcatacctagatcctcatttgttggtgtacaggcatactaacacgttcttttgggtgtgtaaaccccctaatggggaccttggtccccatatattattttactgctgcagcatttttagccaggttcctgatagagaacaggcgagagtccacaagcttaacaatatcagcaacatacccaacgttttcaacagatacatacaaagcgtaaagttccggatcatctaagttattaatctgtcggccgttacgaattttagcgaagtctttcttaatctggcctgattcgcgttggatatcactaagcaagcttagaatctgattgtattttttggtaatgcttgaagtatcgaatttaacaccaggtttaacaggttctttaacaggcttttgcgcttcaacaggttttgccgtcggagtaggtttaggtgcttcaactttagtcccagaggctttaggaggagccacctttttctgcccagttaaagttttaaatgctgcctggaccttagcgtaatctttcggtgtattagtactgataccgtagatcttttctacagaagcggcaaacttcataaaatcatttcgttgatctctaggaaccatatccatggcggcctgccatttagctttggtcatacgttcgctagattctgtgagaatatctttaaattttaacatcagaggttcccttattaagttgtttatcctatttatgcccgaaagggagaccgaagcctccctttcttctcggctctgatgacttggatgcacccagaggtcattcgccagccttacgtcttcgagtgcaattctaggacgtcattctttattctgctatgtaaagtttaatttggtgccggttgacggaatcgaaccgccgaccttctcattacaagtgagccgctctacctactgagctaaaccggcttatttgatgaagagttacctacgtcactaggttggctgttctgtccacttaaggcttgcagcaggaacaccatggcttttcaccattgatcctctcacgactgagacactcttcataatttggtgcatcgagagggattcgaaccctcaatcctttcggcgggagattttaagtctcctgtgtattccagttccaccatcaatgcgaaatggtccacgcagaaggattcgaaccttcgacccacggcttagaaggccgttgctctatccaactgagctatgcgcggaatattattcaggcaggacttgaacctgcacgcctggtcagcaccggtttccgctttactcacccgagtaccaatcggggtttcaatcaagctattccggtcgtgtctaccgatttcaccactgaacgtttaataagtttatttagtatactctataaaagctaaagcaaaatgtggatctaccttaacaattttatgagataccttgaatcgatacgaataagaatccacaccaatcccatgggctgttttgcctgttactttaccaacacgcatttcaccatcttggcccatgcctgaggtttttacaccaaataagatataatcaccttcaaaaactggaacaccatgtcggtctttcattaattctatcatttttcacctttaagcatttcacgtacacggtaaaggttactacagaattcttgctcagttagaaccgtttcattctttttagaacgtcccatagagtgagttaatgtagcgttctgtgtagccaggagagctctcttgaatccttcattagtagccaattgatcatatgcccgttcaataagaagcttataggcctcactctggcgttgcatagggacgcctttccagtacagagtttgtgtacgccaccacttcttctttttacctttgaacttagccgctttaccgactaatgtacaaacgtgtgcagccatttcaggagagctgaacttcaatgattgtaagaaaccttccattgaggcgcatttaacaccgtcaatttcaaaagcgtgcggagcaaagttgcttaaagcacaacttggataacttgaccctgaaccaatatccattagatatcctctacgtgaatcatgattgagcgtcgacgaacaacgcaccctttaagttcttcagcggcttcaattagtacacggcctgacggaagaataagcccgtcaattcgctgttgggcccgtgctatatcgataaagccgtcggcatcaaggatatctgtgaattcccacccaacccagtattcgttgttaacgtacttggcatatgagccgaattctggattaaaaattacgtaatcttgttgcatctgttgttccaaattttagttagaccagcatactcgaaggcacgcatacaggaaagaccaactttaccgtgttcttcccactcaataactctatcattatctctgaaagcaagacctttagctggttcagcgtaaggctttaattcttcaggaacttcttccatcgaatcataaacgacagtaacgccacctttacagccggcaatgccaacaccgcatttgcattctaacacacaacaactataactgatatacgtaaaagggaatttttcgccacagaacgggcaaggaagtaaatcttcatttaggatagtcataatatttttctcagtagatgattggacggaacgcctgggctcgaaccaggttatagaacaattggcgttgaactacatttttataaggccagtaaatcgtttcctcaacaggcacgccgccaaacgtgtcaccctggagaaaagtcaatacgtcctcgaaccgtataccttggggtgggccgcagggtcctgtattggaggtcctgaagatatttccaccccttacgttttggtgaccctggcaaagactcgaacatgcaaccactcccttatgaggggaacgctctaccgattgagctacagggccctgaatccgggtctaaagagtacaaacaagtagcttgatgtagtacacatagcacgctatgtgggaacaatccacttcggccccggcatttacttacggacctctaactcatctctttagactgccatgtaattatctttcgtagggatacgaatctctcaagctttccagaaagctgaatcgctatacctcgaaagataactagtaccttcctgcgccgcttcaagctgtgatatacccggtttcaatgagggacctgtataacagggaacgtcagttcgacgacttgcgagtgcgcatccatctgggctaggcctcaacaaggtcattaccagattggtctcgcttcttatttggcgggccgtgcaggtatcgaacctgccttgtcctaagacacggattaacagtccgtcgcttcccctctcagccaacgaccctaattggtgggacaccgaagactcgaacttcggacacccggattaaaagtccggtgctctaaccaactgagctagtatcccatttatttggaggcgggtgatggactcgaaccatcgcgtaacgggatatgagcccgtcattctaccaactgaagttaacccgcacctatttcgaaagctctccgccaatcatgatggtttcactcgattaatccaggaaggctgtacacttcccaccagattaacaggtcaagaactttctgaatagagacctcatattgttttagagcttaagccaccggcttctcttgaggtcattttgagactgttgtctccatgtagtaataatatcacttaaaacttaaagcatattaccggctgagcataatgtaatcatgctcaatacaaccagccatttgttcgttcttgaagatatcatactcaacaggagcattatcttccatcacatagaacgtgaagttcacgctgttataatgatatttatcaccaactagctggacctttgtgctcgaacggccgatagaaatctttttgacttcatgaaacgattcagcaccaaatggagctacagcaatcaggttacgggccagttcagaatcatggctatagccattatcaggatgagttactttagcgaatactttcattagcaataaccgctttccacaattacgtgtgtattaaggttgacgatatgccaccagtcaaaacgatctttgaattgtttcttcataagatcgcgcagttcatcgatactctgcgatttagcccgcaaatcattatacccgcccgacgggtaataattagacccagcaaataatgcaaagttattaccggtgttcatagaacagcctgaagcatctaccaagttaccttgctggtccgtgatttcgataaacgaataacttaagtcacgggcatattctacagcatcttggtatgtttcaaaagaaccacataagatgcggcaattaggccgagtatgcggattagcttcgaaatcgccgtataatttatagttcattggtgtacccgcttgtcacagaacaaaaagaagaactaacgacttcatacttatcgttaaagtctttgcgttcacgtgcggctttaatagcttcttcaacagagctatagcaacctacaaaatcgcctgttccgccgctagggtaatactgagaccacatgaataagccgtacatattttcctcacttagagatttcattcattacgaaagctacaacaatcattgataatgccagtcctgcggatacggcgttttctgtagtagttaacagacctgccataaaaccggcaaacatagaaactgaagtggctccaagagctactgttactgctacattacgaatgatttctgcacgtttcattttaatctccatcacttttgttttgatagggccatcttatcatgaccagatatcgatgtaaacaacttattcagcaccagcagctttcaaaagttttttgaggttggcagaaccacgggcagaaaatgtaaccttgccatctttttcaccgatgctaccagtcaatttagcaagtttatcactagggacttttttaaaatccgccagggtcccgtcaaaagtttttgtaacaatcggcagttcgtcttcttttcttttagcttctgtaataaattcttgatacgttttcattttttgatttcctgagtaagttggtatgaaagtatagtatcatgtctattcagtgatgtaaactgtctaaatgcaaaaaaggagaccgaggtctccttattttaaatcgtcagcccagtctagttgaagtggttctttgtattcacggtctaaaactacatgacacttgacttcaccttcatagtgagcaggccctatgttgtagcttagggtgatatgcggtgtgtactcaggaaaatcatgtgtagcacctagagcacgagcatagttatgtcggaactttagataatcagaatccagtttgagaaccaggactttgccatctttggtatcccaggtttcaagttctcctgaagtagcaacctcaaaactcccggttgagcatacgtaaggtacgtcaactcgagagtagcatatcgttgaatggattttatgacgaggaaccggattaggaatcttcaactcgcgctgaagattctcgatttcatctaaagttgattcagaaaatttagctgcaacataaaggcctgtagtaaagtttttaaacttcacttagccttctacttctacttcagcttcagcttcatcttctgcatcaccggccagaacaactgacttagctgcttctacgatagcggccagttcaaaagaaccgtcttctttagcttttacaggcagaatctgaaccagttcacccagaacggcttccagctctttaatgcggtcttgggaagcctggacaacttcagacagatcgaatacacgtactttcagggcgttaataatatcttgactcattttaataccttatcaatttttttgtagagttcttcaatagaaccgtcgtttgttattacaatatcaccaggcataaccggaagaccacgctcggtgatgtgagaatctgttttagtttcttgagacgggcgaactacatggataattgtagcacccatcgcccgggcaaaagaaatttcatgttcttgacgaacatctggaactacgaagtaattatacttctcaaagttatcagcatattcgtccatacaccatttaacccaatacatcttatcaaagcaattgaccacgatatcagttccgagggcctgcatcagacgtctaacggaccaatcatcttcaatagtatttatgacgcgctctacttctctttctaccgagttcatcggtaagccattgtaagtagcacacagatatttctgttcagacaaccaagccatagctataagcatgatagcaatgactctcttcttgtcaaggaacaagttctgctcacggtcgtaatcgataccttcgatttggtcccgtgttaattgaggcatgtcaggataccgatacttagtcaccgatatggcgtgatgtaatgcttctttgattggccacgccaactgggccttaatggcattgtagttagccataatataatcagcagtggtatccttaccactgcgctttttacctaaaagataaacttgtttcattgcatactcggatgacgacccctgatttgggcctgtaattgaacttcccgcgcctcgttaataggggcacgtccctctataattacaccgttttgttcgacttcgatgtacttatagttcaatgtagcagtgcaatacatcggaacatcggaatcttcagctaacgagtattctatttcgcttaagtctgagatccatgcaccgacataacgtatagtcattactatatcacgtttatcgttatcaagaatatgcattagaactgcgtcagggaacccgtcgttgcgtccccagccggatttatctcgattcagataattgttacatgctagcatccactggtaacactggacccaagattcaagcttttcatctaccaagaatcggcatgctacggcatcgaattctatgctagcagaacttaaagaagcccgatgcataccttgaggctgaccagccacttcagtaacagggatgtgaatccctggaacagcagctacttgaaggttcagtttaaatgctttagtgaggttcccatcaggaacctctaatagaaagtttgttgtgttagtttggttaaataacccaccattcgaatcgtgcattatgatttccatactgaagtagcagaataacgtttgcctttcgacataaactgctggaggggtaacattactacattagcccaatctgcgggcttaatctctatcatcggaccttttatatgcccaggcaaataggatttaatcatccggtcagtgcctttaaagcccttcacttgactccagttgattttaagtttagtcttattggatattacaggtgtgttcgcgtattgcttcaggagctcttccaggaatgcctggcgcgctttaggaggtatgtagtgaaggttaagcccgtacataactcgtgaactaccgttttggccaaatccaagattgataatcaacggatatttgtcccagtacggtagggtatctttatgcttagcatcatagatatacgcatacaatttgcctggttcaggcctagatacctggtggcctcgaacatttttcttaatggtatcattgaaccatctagccgatttgttgttaacagctgctccttcattctttattttttcgcgaagagaactacggaaactgttaatcataattaactgacgttcagctttggtcagtttattctgtggtttcttttctaacttttcaacctttacggccgttttaatacgagattggtaccgcgacatggctttagtgaacgaagcataattgaacccacgttcttctgcgaattctttagctgtggttcctttggcctttgctttagcatattcaacaccaatcttgacccattgctgctctgatttacttggtgcacgattaagcgctggagcagcttcacccaagaattcgattatagccattagcaacccttaaagcctagctttctaaggccttcttctgttaagattctgaaagtaattcccatcttatctgcagttttctgggccgctttccatttgtcaacattaacgctccaagtgtaaacttcgttaatatacctttttttagctgcagctgttaatttggatggcttttgcggtggagcagtttcttttttaggtttaatttctataaaaaattgctgaccattgatatcttggaaccagaaatccatgaagtaacgccgtttctttccttcggcattacaaaaatatggtattactgtttcttctgaggcccatttaactacttttggatttctatctaaatagcccatgaaaaatttttcccaagagcttctataagttattttacggatatctccgcggtatttagaaacgttttcaggagtaaatcgtccgctataagccacctggtttctccttacatttatcgaagtgccagcatttcataccacgaggcttacctattttaccacaataagggcacataattaaaggctgccttaaagaaacttctcgcatcttagccttagtttcttcacttcttatttttccagtgttggatttatttaatttatcttggtgttctttagttctgtttttagcggctatagacattttagctttcatcttttcagatttaggtttcccttttaaagccttgcttatggccgttttatgttcttcggataagatttttccggtattagctttagaaattttattagaccattctttagatcttggggctctttttctacctttcaaaagagcggaattagcagctgccattctttgacgcacccaggaatatgatttgttatttcttccattaagatttgtgctcatcatatgacacgcgtaagccaacttatgatttgtagggtatatcttaagaagaagctggtgtgctacatagtgctctgatgcagtaagattgacaagattttcagcattatcagatccacccatacatttagggataatgtggtgggattctttataaccttctaaagttctatttttagctctttctataagagcctcgtaatgttttacataattcatattgttctcctctttaaagcgtgtcaatattagttgtaaaccgtataaatacatatatcaatatttataaaaggatacact

SEQ ID NO: 69 - DNA, 167773 bp, unidentified
  source 1..167773: mol_type = genomic DNA
atgctcttttcgttttttaatccaatcgaatatcaagctaaaacgactggtagcaagaagataatcccgacagctaatatctatcgtgattaccaagaatattttgaccgtgtagcggttaactacttgcttcagaactattacattcaaggtgctccacgtccagaagaactgtcctatgaattgtatggtaacacacagttctattggattctcttaatgtgtaacggaatctacgatccttatcacggatggattaaatcccaggatgcttgttaccaagcagctgagcagaaatattctaaagttggcgggaaccagattttgtatcatgttgatgccgacgggaacagatattataacgtagagcaggttcctcctaattcaggcatctggtgggctaaaggcgagaacgattatactaaagattctcatatccaataccgcggtgcgttagctccagtcgatgtctatgaagacgctatactagaaaatgaaaaacttcggcagatcaaaatcgttaaccctgttgatatcgaatcttttttatctgatatagttcgtgaaatggaaaaggccccagaatgattgaaatgaatgatgaagtacgctggttcactggcgtcgtagaagatagaatggacccattaaagcaaggtcgtgtaagagtacgtgttgtaggccttcacccgttccaaaaaactcaagggcctatttctggtatttctaccgctgatttaccatggatgactgtagggcagcctactaactcggctggtatcagtggcgtaggccattcaattacaggtattgtcgaaggtagtacagtttttggccaatggctcgacaaatataaaacatcaggcattgttactcatgttttatctgcgcatagtacaaagaagcctaactacacagaagggttcagtgaccctacaggacagttccctagatatttaggttctgatacgaacccgctgactcaagggtctgaaataggctataatagcaatactaacgttattcaggatgctaaccttgatgttggtattaatcctgattcaacagatatcaatgatgctaaaccagatgacgatcctaatttcactattgaaaacatgcttcgtcgcgatgaaggccttcgtttaaaagtatactgggattctgaagggtaccctaccataggtatcggccacttgattgtgatgcagaaaatacgagatatggcccagattaataaaattctgagcaatcaagtagggcgccaagtaactgggaacccaggcatcatcgaaatggaagaagcttctaaattattccagaaagatttagcagatgttcaacgagatgttaaaagccatcctagggttggccctgtttatgctaaagtaaacaggtcaaggcagatggctttagagaacatggccttccaaatgggtatccatggattagcaaaattcaaaggtatgttagatgcaatgcttgctgaagactggcaaacagcatttaaagaagcccgcaactctgtttggtttaatcagactaaaggtcgtgcttcacgcgtatctatgattatcttaacaggcaatttagaatcatacggtattcctgttccgccggaacaggccaaaggaagaatgattcaattatttgccgctcccagttcagatgattctgatgacccaagtgctccatggactcctacggattcaaggattctgttcaaagaacctgaaagttcttataaaggcgaatatccttatgttcatacgtatgaatctgaatcaggacatattcaagaatttgacgataccccaggttacgaaagatatagactagtccatccaacaggctgttacgaagaagttgctcctgacggacgccgtactcgtaaaacagtcgccgatctttatgatatgacccaaggtgacggtaatatcatgatttccggcgataagaaagttaacgtaggtggaaacgaagtttattataatatgtacaatcgccgtcatcaaattgatggtgacaataccctctacatccgtggaaatgaaactaaaactgtagaaggtgacgggactatcatcgtcaaaggtaatgtaaaagttatcgttgaaggaaatgcagatatccaagtaaatggcaatgctaccactaaagtggatgggaaccatgaaatgaatgttggtgggaatatgtcttatgttgttgctggaactgtttcttggaatgtaggtgggtcttggactgagacaatggcttctatgagttctattgctcaaggtcagtacactatcgatggtagcagaattgatgtaggttaattatggcccagataattccaataaatacaacattagaagaacttatagaaggtgactttgtagaccaatatttcactgcctctttagaggcagatgaaactcttaagtcaattactattactaactaccaaccagtaaccggtatcactgtagctcaaaaccattatacaggtaactataactcaattttcacttttggtgctaatgcgcttttataccgagaaggcaacgatctgaaatcagcttcagcatgggaggagttgcctcctccaaaagaagctgatctatacttattcagggcccctacggcgctttctaagacatttacgtatactgttgagttaatctatactgtaactactccggcagtccctggcgaaccaggaagtggctctgttgaagagaaaaaactgacaaaggtctattcacaaacagttaaaggtaactggagtatttgggctaaaaagctgcgtgattacgtatatgcggggaactaaatggcaggcttagcatacaatcattgcattacgacaggtcatgatgcttatcctccgaccgatgtaaatgctacacaatctaaagtattcaccggtggtatagctgtcgttcgtgacggcgatcctattactccacacacaaaaacaacgaagcctcatgatacacacggaggcgtcgtagaggctagaacgagtaaagtattcgttaacgggaagaaagcagcccaaatggccgatccaatttcatgcggtgacaccatcgctcaatcttcacataaggtgtttattcactaatggctactacagaaccagtaaattaccagttgacgcgtactgcaaacgctatcccagaagcattcgttggtgcaacctttgatgaaattaaaaataatcttattgattggctttcaagtcaatcagagttccaagattacgatttctctggttctcgaatcaacgtactgctagatcttttagcttataacactctttatattcaacaatttgctaacacagcaatatacgaaagttttataggtaccgcgaatcttcgtagctcggtagtccaggcagcccaagaaaacggatatcttcctgcttctaaatccgcggctaagacttctattatgctagatgttacccacgacttaaatccggtatcgattagtattccgcgtgggactaagttcttggcatatgcccgtgatacatcagcggacccgtattcttttgtcactaccaaagatgtggttgtaactcgtgatgccgataaacattattggcctgttgttgaactcgctcaaggtcgaattattcgtcagataattcagtatgaccctaaagttcctattttggtccgtgatcctaatatcgacaggtcagaagttcgcttaatggttaacggttctgaatggactaactggactgatcggtctatggttcacaccggaagcacttcgcacatctactatatgcgtgagaccgttgatggcgatacggagttcttttttggcgagggtgtagaaactacttctgtagccggtggtgttttggaagccaactttattggcggtctaaaacctactcgtaacgacacaataaccatagaatacctccgtaccgaaggcgatgttgctaatggtgccgtagattttagttatgcagacacactccagtatgttactgttaataaaatcattgaaaactggaccaattctcctgattatgtcggtgccgacggtggtggcgaccctgaaggaattgagcgcattcgagaacttgctatcctgaaacgtgaatctcagatgcgatgtgtttctaagtcggattatgaaagttttgttagttctcgttttggtaatatagtccaggctgtccaatgctttacagacccagataaaccagggtacgcatttattgcaattaaaccaaaatcaggtctacaactgactgctgtccaacgcgaagacattaaagcttatttagagccgtttacattagctcctattactcctgctattatgtccccggattatttgttcatcaagcaaaatgttaaagtttcttatgctatgaacaagttacaagaatctgagcagtggcttgaaaataaaattttagatcagatagatacctattatcgtgatgaagtagaaatcttcaatagctcatttagtaagtctaaaatgctgacttatgtagatgatgcaaatattagtattttaggttcatctgccacgattcaactagttcgcgaagttgttaattattttgttctgcctgaaagtggtattaaatactataatcaaattaataagcggactttagagtcaagcgacatttcttttgtggctaattccgagttgagttatcctgttagaatttacggagcagaccctgacgagttaggaaaaggaaatattgttatagggcctttccgagacggcgatattgttgagaatgcgcatattacgccgtacacaggatctgattttaacaagcctattatagaaggtcgtactaaattttataaagtcggcgaaatctcttatccgggtgataacatctattggaaccttggggctcttggtgtaacttcagatcgttttgaagaccaaagcatcgagctttattctacgccaagtcaagatattatcttctcaagagatggaacacttatcgtatttgagaacgatttacgccctcaatacacaactatcacattggagccaattactcaatgacaattgcacctttcgtcaccagcttacgtattcacaagctatcagcgaaccaggtcaatattcgttgggatgacgttggtgcaaacttctactattttgtagaaatagccgaaatcgaagatgaaaccggtcgacttctcgaccgttcttctttaagttggcgtgcactaggttataccactgaaaacgaatggttcgcaaataacttgcgtcctatgaccacgtacagaatgcgtgtacaatcgacagcagcgggattcgaaccttcggaatgggtagaaactgaagactttgaaacatttgaagttaacgcctacacatttgaacagatgagccaattcatgcttatgaaaccgttcattgaagaaaagttcattaagaaccacatgaactatgttaacttcaatacggctgcattacaagcatcgttgatggctgaaaactttcctatatctactgaatataaagatctttcccaagttagacagtatgttttaggcgaagatgaattccatgaaattcaagggcctatagaagcggtctgtgtagataaagacagaaccatgcttgctgaaatagatggcaacctctatctgtttgaacgcttccagcacatggtcaaagtatcgaatgataaaggccagaactggcactacgtacgcctctttagtgatcgcgtaggcaatcctgtttcaaggacatgtgtttatcaatccaatactactacatacgtcctgggctataataaagtgttctatgggcgtaaatccagtgatgttcgttggtcctcagatgaagttcgttttagcgataacgaagtaacatttactaagttaggtgaccagcttaatttagggttcgaagtagaaatcttcggtgtatatgcttcatggcctggtattcttaatactagagtagaagctatgaccgttaacaatacccacttatacggtgtagccagagacacagttcgcagaattaagttaaaacaagctccggttgataccgttattgggtcccctacattcggtgaaaagttatttgagcctgaaataatcagaataactggcgacgacctagctgtttgttataaaatggattctatcggcggcaaaatctttgcacttattacgggccgtttaaaatccgcagggcttgatgcatccgaccctaaaaatgttgaatgcgtatctaaagaagctgaagcaattaaaggcgtttacgtatttgacgaagatactttaagctttagaagagtttttggtactacagcagaagaacgcaggagaattgagcacggatggtctagtatgtccactgatggccaagaactgttctttagctctggcgactttcggtataacgagtatgttcctgataatgaacttcctttagaataccctgccaaggttacagaagccgtttcatattatgctccatatcagtaccatcatgataaacattggcatatgatgagcttccgatctaacgaaaatagcggatgggaagagtttaaacctggccgtatgaaattttatgctgagccttggtttaactggatggcccgttctggaaatagaaactgggttactactacggaccatgctttagtagtttataacaacactacttataccaagtatgttgatactctgtctttaacagatcctaatcgtattttgcatgaagtttggaacaaaggcgacggcgtattctattgtcctaacgtagagtttgatagcttcttaaaatatgcctctggtattatgttccatgaacctgatggtactttggtaggattctatgaatttgaatacagagtcagagattatgttaagattacttggaaacctaaaaatgttatgttcaaagcatttttacaaaaccaagaacatgaagttccttgggccccaacagaagatactggtctccaagatcctgatttagttcctttagttcgtaaaatgatgccggacagttatttgcttcaagatactaactttgaggcgtttagtaattattacttgcagttcatttctaaaggatacgggactcattacaataagcttctgaaccttgttcgtgataagtaccctagagaagaacatgcttgggaatacttatggtctgaagtttataagcgtaatatctacctgtcaaaggagcggagagatgctgtagtacgtttcttcgaagcccgtaaaaatgacttctacgccacaaaaggtattgaagaaagctacaagttcctgttcaagcttttatataatgaggatgttgaaattgacatcgaatctaaaaacagcaccgaatatgatatagttgttgactctgataatatcaatgacgatattgtgggtcgtacgatttacacagcttcaggtcgttgcaatgtaacgtatattgagcgcgaatatgttgacggtaagcttctatggcgtatgactattcataatatgataggtcgatttgtcgctggtcaagaagttaaatctgaaaagacctcttttgaaggtatgattgttgtgggtgttcgtggtaaagaacttatttctaataccatagaatatattaaccgttctcgttcttattatgtgatgaaaattcgttcttctcttcctacttctagatacagagatgacgtactgagatttgttcatccggtaggtttcggcttcgttggcattactttgatcacaatgtttattaatgccggtcttagtatgaaacacgttgaaaccaccataaataagctcaagaactataagtgggactcaggcattccttcgtattatcctgacagaaatgccgcaatttctcctagtggaactatagaacgagacgcatggggtgaccctatttactacgataatgtaaacaaaggtgttccttacccatgtactcaagaatatatcacagagaataataatagccaattccaaggtcaaggtccttgtgaaagacgtaagcggcacagtcctttatttgaccagtctgcagtaacattctcttgttatagagagctggtagatgaacggcttaaagataatgtaggaaatcctcgtgatcctgagaatccaacccaggtcaatataggtgaataaatgtctacatctgcgttagcatcagtgaacagcgcgatttatcgcgctgttattacttctaaatttcgtactgaaaaaatgtacacgttctataaatccgtaggagatggaccagaacaaaatacattgtatataagcttcggcaaatctactccatggtctgctaatgaaaacgagccaggatttgccccaccgtatccttcagatagtactgacggggttgttgatgtctggactaatatgatgggcgctgttaaagttgacccaagcatgctagactgcgttattccaaggcgtgattggggtgattcgcgttacgataactcaacatttttaattggtgatattgtagttactaataacgccccgtataataaaaccgaagtcggcgccggttggctaatttataaatgtgttgatgttccaaaagaaggtatgtgttctataggccagttatctaataaagatgaatgccttgcgctaggtggtaagtggtccccttcaagaacttctactattgttcctagaggccgagcagatactagtggcggcactaatggtatcatagatacaggagacgggtactattgggaatatctttatgagatcccgccggatgtttctattaaccgttgtactaatgaatatattgtcgttccatggcctgaagaagtagcagcagacccgcaaagatggggttaccataataatatcagttggcaacaatatgattatgacatcatttatcgccttaaagccaactgtgtgcggtttaaagctttcctggactcggtctatttcccggagtttagtttaccgggtaataccggatttagacagatttctgtaattagtaatcctttagaagctaaaaagaatcctaatgatcctaatgttaaggctactaaaggctcttatccagcagtaagtttgtttagacagtctggcgaaataatttatatggaaaaccgacaaccaatcattaggtcaatggaccaaactgaagaagttagtatcatctttgaattctaatcagggagcctcacggctcccatttttgtttataaatatctctataaacatattgaggtacactatggcattcacacaaattccaaaagaagtcgtaaacgtaggtgagattggtaacgcctcaacaggcgatatcttatacgatggcggcgttaaaataaacaacaacttctcagatatttttaatgctttcggcgaccaacggctttttgcggctgctgatggcgagaacacccagataatccatgcaaccggatattaccaaaaactgtcatttgccgattatagcagtagtgaaatagctttaggaacttgccacgacatttctaccaatggtcaaaagctcaatgttactatagctaaaggcaacgttggtgaagctatttactttgtaaatgctgacggttctatttcggcagaaaccagtcttacaataacaactagtgctaatgacggattcgcttcaggtggtaataaaattgaaatagtttctccgtatactagggttgaagtctggtgtatttctaaagatacctcaggtaattgtatttgggattactctattacaagtatgtttggccagcagcatgttcctttagaaagaacgtttacaattaaccaaacaggaactgacattgttattgctggggttaaagaatttaactctattaagcttttgatgagttatgtagcaacaccacctggtaaaaatatcagacagtcttctgaaacccttttattgattgattctagtatgaataaagtctactctactgaatacgctgttatcagaatgggtggcgaaaaaggtgaagatgaattcttttacaatgctacttattcagtaaattctgcgggtaaagtagttcttaatgtgaaatcaaattactctaacgctagactggcaattaaatctatcggtactcagaccgtcggtacaggaatctaataatgaaacaaaacttaaatattggccaagtagtcgacgacggcagcggagattatctccgccttggtggccaaaagattaataacaactttgacgaactgtactatcaattaggtgatggtacttatcctcatgccgctggtgcttggaaaacccactcagcagctacttctattcgacttgaccctaaaatgggtgatagtttcgctattaatacccaggtggctcgtgtaacagtttatcttcctaaaggtaaaccttcggactacaacagtgttattcgtctacgtgatgtatggtctacctggcggttgtcccctgtgactgtggttcctgcctcaggcgatactattaaaggttctgcatctcctaagacctttaatactaactatcaagatcttgagctagtttattgctctccaggtagatgggaatacatcaacggcaaaaccattgaaaaattcactaatggcgatttagctacagtttctaagaaatcaattattgccactgaaggccaaactgacttcttagacatttttgatggtgaagaatataatccagaatctctgaacgtctatcgccgcggtaatatgttgttttatggtgagaatggatttgacccggttaatgctgattacggttctcctggtccaaacaacactattgtggctttgaataaaaaagatgttcggttagttaagccttgttctgcaggcgatgtaattattttcgaaacctttttagatggtattggtgtatggcgtagctcatacaacaaagttactgttatggttcgcagtaacaaacttacctcagagaaaacagtccaaggctctaaaattgtagccgacttgagtaccctgcgtgaacttagtaccgcagatttaggcgttcttcctggtatagacatgaacccaaattctatcgaggtagaaataaacggtaaaagccaggttgaagcgggtacaggcggtcttccggagtttatttgtgaaggtgcccctggtgaatctttacaagattgtatagctaacggtgggacctgggtccaatcggactccgattatcgtttgatatttgatagtgacgggattaaagtttctggtatcagattcggtcaaccgtttgaagaccaggatatcattactgtccgttggtacaataacaacatcgggactacgatgtccatggatgatattgtttctgagacagatctgatttatatgaatgccgaagaaacggtagatcttaaaaacagaatcgaatacactgattatcagaacccgagccaaaaaactaaagttgacgtgcctaatgagtacgatgttcggttatctaacatctcggcattttttgactcaatttatcctataggaacaatttatgaaaatgctcataacccggctaatcctcgagattacatgggtatgggtgtatggaagatgtacggtgaaggctacgcatctgtagggtgggcttctgatataagtaatccttactttgcattaaataataatgacctagacagttcaggtaggccgtctcatagcgctggaggcacggtcggcgaagttgaattccagatttcagcaaataacatccccgaacttaaatctgatgatacggttcttattgctgatgataatggtaccgtagttatcggcgggtgccagttagatcctgatgcatctggtcctgggtattccaaatatagagaaggttctatcaccgtaaacaaaggcgctggtggcttacctatttctaacgttcaaccttctataactgtctatcgctggataagggtggcataatgatttttactaaaacacgtgaaggggctaaggtcccttcaagagaagctaactatcttcagtttgaattagaccctgaagatatttctgtaggtgatcaagttccttatggctcggtcacactaaaacaaacacaacacggcgtttggtatcctaatatccaggcagcaatagatgatgtccgtgcgatgatccctagcgatgtcggagaagttgttactaatgtaactggtattagtccaggaaaaacccaacagatcactcgggccgttttttcaggtgttgtcaaattagaagacgaaacctctgaagaaatagttgagattctaggtgttgccgttaaacttaaaaacggtgatactgccgagatagctgctgctaaatggctcaacatcctcgagtctatggttgctgataaggttgctattgcagcagtttttagctctgcttctacccagaatatcgtagatattactcatctggattaccagaaccatactttcgaaacttttaaatggaacggtattacagttaactttagtgttttgtctcctgctaaacaaggttacggaagttggaactttttaggtagcgaagataaagtatttgctagtaatactgttcgcttccattatttccagaggatctcgtaatggctcaaaataactttcagcactatagtgacttagctgaatacacaatttttaagccggctaatacagattggccggcttctgtagataatgtccaaaaagcattatcaatgatcggcgactggtctcgtactgatgtaggtttacctgtagcaacacctacaactccgggtattgtggctatagctactcaaactgaagtagatgccggcaaagtaacaaataaatttgttagcccggccacattaaaatctgttatcaccagaccagacgcaacgaccacagtaaaaggcttaaccagatatgctactaatgctgaagctgctgggttcgctatcggtaatgccgctatagttccttctgcattaggccatgtttttactaatgtaacggctactgaaactagatttggtactattaagcgtgccacttatgatatgggacaagctggtaccgatgatactactgcggtaactcctaagcgcgttgtagaaatgattgccgctcattcggccaatcctccttcgtatacaatggctacagaaactaatttaggattagttaaattagctactagtgctcaaattcagcaagggactttaggagatggatacgctatatcacctaaaggattacttggtgctaaagcatctgaatctaaatttggcgttattcgtttatctactgcatctgaaacagctgccgggactttagattctgtggcggtttctcctaagcaattgatggcccttcgcggttctacatcccaatacggattagtccagctatctggcgttcctcagtcaggccaaactgctgcaagagctgatgccgtcgtgtttaaaacaactaccgtaaatggtaagcctttatccggaaatattactttaagtgccggagacgtaaatgcttggtctaaaggtgaagctgataaccgctttatgcctaaagacaggatggtcggtaatattactcgcattgaaggagccacatatcttaactacagaggaaataacggtagtccggatacttggtattgccaaagtccgtgggaaggcttttctactgtaggtatgaacgttgtttgtaaatttgaaagaaactacgacggcggtgataaccgtattttccagttctatgttcgtgttaatgggcaaagacaaggcggaatacttacattaaatatagaaaatactaaaggcggaagaaatggtcattcctggagattcgaggcgtatgcatcgggtaatttccggttcggcaatattcctccaggagctagagttgaccttgaacctattcaatggcaccgggttttacatgtagacgtattggccacattctgcacaaattaaggattcttaatgattattaagcttgaaactttacccaatgtaactaaagacccaggcgagtctcaaaaacgaattgcctggattaaaaatggagagccgcttaatgcggcttctactcgttacggacacgaaggtgaacttaaccgagtcggcgttcaactccaagagaacatcgaattcgttcaccatgaagtagaacgaactgtagaacaattaaacaagaacagtactgaaatcgaatctattaaagaatctttagaaattaccactgatgttgatgcagtaactcaggtttataaaaaccgtgatgacattgtactggttaattctgaattagatcttcacgagcaagaaatagcttctttaaaagaatcttcaacaaagttaactgctgaagtaggtgtatataacccgaacttagaccctaagcaccgtactatacgcggagatattgtattcatcaaagatgaaatgggttcttatcccgggcagaataaaaacggtgaagttgatttaaattctcctggttccggcatgaagcttcgcatcatttctaacagtgatgccatttctaaagttactgctagggtccaagatcttgaagacaattttatcgattctgatgtaggtgctttatcaggcagaattgatgaaattcgtactgaaataggacctaaaaccttagcaaatgggacttccatttacagcagaataattaaggctgacaacgatattggtcttcttaaatctgcccaggaaaatatttctgcagctattaatttaacaggccctgaaacaatttcttctagagtgtctactttagaatcacgtaccctatctattgatgctaccgttaattcggctgggactggtcttgttgataaagtaggtgccattgaagtaaaaatcggatcagcttcagaaccgtacagcattttaggtagattagatgcgattcaaactacccaagatgaaattaagaccgttgttggcgaagatgcgtcttctggcatgcgcgggcagatagcttggattcagcagaaaacaggtattgttggtccaggtgaaactccagaccctagttctattgaagggcgtttgactgaagttatcggtgttcaatcccaacaacagtcatctattcaggacatccaggctgaactgggtaacggtactaatggtatcacaggccaattaaacgaagttcgtaaaactgtttacggtaattctagctctgcagaccctattgaaaagagcggtcttttagagtctgttaaaaagataaattcggactatgtgcaggatgtaactgacctgaatgcttacctccgtacaaaagaccagtggatcaaaaaatccatggcgatgggttcatttaaaggtaaagacctctctgcagatttaaccggtgatggttttgagtattcgttcggtcctggtcttgtagctgccgactttaataaccagatttgtgttattaatagcgaaatcgttatcaacgactcggcaatttatgaggtgtcagcttctgttattattgaaaaagctcacgcagataaagttcttgatttagtgttttatgttgacgacgtttctgtagatgttaattctataggtgttaaaaccgtagcaggctatcaagttgttagctttgattggcttggacagttagaagaaacagaccgattacgcctggctattaaagcagtcgaaccggcttctcaggtcgttttaaatgtagaagctgtcgatattactatagttccggcgcgctaaaattaagggaggcttcggtctcccatttttgtataaatatgattattatatgaggactttttatggccggacaagttgctaataatccttctgaactgaaggaccttatcttgcgccgtatgggcgcaccaatcgtaaatgttgaattaactactgaccaaatatatgattgcatccagagagctctagagctctacggcgaatatcattttaacggtctgaacaaaggatatcaggttttctatattggcacggaagaatcggataacgcccagttcttgaatggggtgtttaatctccgaggccgtaatatatttgctatttctcagatagtacgtactaatgttggctcaattacttcaatggacggaaatgctacttacccttggtttacagactttcttatgggtatggctggcatcaatggtggtatgggttcatcttgtcaaaaaggatacggtccgaatgccttcggcgctgacctcgggtattttacacagctgatgtcttactggtcgatgatgcaggaccttttatctccacttccagattattggtataactctgatacagagatgctcaaagtaatgggtaactttatgaagggtgatataatcgtttgtgaggtatggactaaatcttataataacgtagattgggctgtaggtaacaccgccggatacggttatgctggttctaataatgctaatcagtggggcatcggcgaaatatatgataatcctaataaaggaatcacaggccaatttgcaggtgaacagaaccagaatcgcgaaggggcctataataatcgctgggttaaagattacgcccattgtttagctaaagaacttaatggtcagattttggccaaacaccaaggcatgatgcttccaggcggcgtaactgttgacgggactcgtttaatcgaagaagctcgtatagaaaaagaagctttacgcgccgagcttgaactgcttgatcctgggtgtcctattttgctggggtaataatgagcacttataattcaaatctatttgctaaactcgaggaccgttcgggctatgctaaaatcaatgaaactgagattttgaacccgtttgttaacttcaacaagtatactaacacccaaactctagctgatgtactggtagccgagagtattcagatgcgtggaatagagctttattatctgccacgccagtttaacaacccagatcttctgtttggagaagacccgcaatcaagctttaataaggcttggatgtttgccgcttatttgaacagctttgatggttattctggggataatacgttctttagtaagttcggtatgtctgttaatgacgaagtaacatttactattaatccaaggttgtttaagcaccaagctggcggaaaagaacctattgcaggcgacctggtttatttccctatggataatagcttattcgaaataacttgggtagagccttatgacccgttctatcaagtgggtcagaacgcaatgcgtaaaatcactgcccagaaatatacctattctggtgaagaaatgcagcctgaactgcagcgtagcgaaggtatcaatattcctgaatttagtgagcttgatcttcagcctattaaaaatatcgatggattggctgatatcaacaacgatcagtacgctgaaacagaagagattaatgctgaagctgcccagtatgtggaacctttctacgtcaataacggaagaggaaattatgttccacctaaatcttctccttttgacgatgggttcttagatgattaaataatctatatgataaaggataaagtaggactatggcttggtgatttagcagatgaatatctgtcggtggtcaccaggccacctaaaactaaacacaccgaaaagcatcatattctacctcggtctttatttccagaatatgaatcttgccaagaaaatatagtttctctggacattttagaccatttagaagctcatgaagtattggctaaaactaaaaatcctaaaatgatcatggccttttggattatgtttagtagctcagaacgaagaaatcttgatttatctgaagatgagttaaaaactaaatatgaaaaagcccgtgtagaaatgaaacgagttaaatctgaatggggcaaaactagggtaggtgaactaaattcattctttggcaagcaccacggcgattatgctaaaagacgtattagtgaaacccataaaggtaaaaagcttagtaaagagcacgccaaatcatttggccaggctcaaaaaggtgttccaaaaagaaaactggaatgtcctcattgtcacaagatggttccttataacctaattaacaggtggcataacaacaactgtaaatttaaagaagattaatgggggtggtttatttttggtttctggtacaattcgtccttgcgtagatacatcgtgttgatgggtgatttgttttcccatgtccaagtagcgcgtctacgcaatgaccaaggtcttaaatatattaaagtccctatttcgtatgcttctaaagaaaaatttatgatgcagcttaataagtggactgctgttcaatctactgaagataaagcaaaaatagaaactattcttccaagaatgaatcttcatttagtagatatgcaatacaatgcagcttttaaaacttctcagcttaataggactaagtctcagactcaagatggtaaaactccagtctcgcagtataaccctactcctattaagatgatttttgagcttggaatctatacgcgtcatcaagatgatatgtatcagattgtcgagcaaattttaccgtattttcagccacactttaacacaactatccacgagctttatcctaataatatccaattcaagcgtgatataaaaatagttcttcaaagtattgcgccggatgaacaggttgatggtggcgctaattcaagacgtcgccttgagtggtctattatgtttgaagtaaacggctggctttatccacctgttgctgagcttgaaggtgagatcaaaacagtttatttggacttctttgcaaacagtaaagaactttcccataatgataattttgaatccgttgatacagaagtagtcccgaggcatatagaatctgctgaatgggatggttcgtatgaacaaagctattctcaaaatattcctattccgtcaggagatgttcctcctggagtgaggcgaaatgagtgaagtactagacatgagcaagctgttggatatcgacagcttaccaggaattgaaggtgaagaaattcctgtatacgagaaattagaactcgttgaagttaaatctaaccctaataatcgtaaacctgaccttgaagacgattactcagtggttcgtaaaaatcttcatttccaacagcagatgttaatggatgcaggcaagattttccttgaaactgctaaaaatgctgattctccacgccatatggaggtatttgctactctaatggggcagatgaccgctacgaataaggaaattcttaaacttcataaagaaatgaaagaaatcaccgacgagaaagttgatactaaaggaaaaggcgggcaccagacaactaacatcgagaacgctactattttcatgggctctccttctgatttgatggatgagcttggcgatagttatgaagcccaagagcgattagaaaagcaggttaattaatggaacagccagttaacgtctttaacgatgaccatccgttgaacgttggcgataatattgtaatcaagccgcctagttctatggcggttaaaacagaaggcgggatcaggttctttcagtctcaatgggaccagaagtggtatcctgaatcttttgatgattatcttcgcattaacggaatagtcaagattcgtcttcaaggcgaagatccaactaattttagaacatttaaagataaaaacaataagcgtactcgttataatgctcttcctaaccttaaaagagcaaacattaaaacggcttggactaaagaaatggtccaagaatggaagaagtgtcgagacgatattgtttactttgcagaaacttattgcgcaatcacccatattgactacgggaccattaaggtccagctccgtgattaccagcgtgatatgctgaaaattatgtccaccaagcgtatgacgacatgtaacctttctcgtcagcttggtaagacaactgttgtagctattttccttgcccactttgtttgctttaacaaagataaagctgtaggtgttctagcgcacaaacgtagtatgtctgaagaagtattagaccgtactaaacaagctatcgaacttctgcctgattttttacaaccagggatctctgagtggaacaagggcaacatcgagctcgataatggtagttccattggcgcctacgcaagtagccctgacgccgtccgtggtaactccttcgctatgatctatattgatgaatgtgcgtttatcccgaacttcattgatgcttggcttgctattcagccggttatttcatctgggcgtcgttctaagattattatcacaacgacccctaatgggttaaaccacttctacgatatatggactgctgcggtagaaggtaaatcaggtttcgaaccgtacacggctatttggaactctgttaaagagcggttgtacaatgataatgacatatttgacgatgggtggcagtggagccggcagacaatttccgggtcatctttagaacagttccgtcaggaacatatggctgaattccaaggaacatcaggaacactaattagtggcatgaaattagcggtcatggaatggattgaaaccgcccctgagcagaactatttttatcgctttaagcagcctgaagaaggtcataaatatattgctgctttagactgttctgaaggtcgtggacaagattatcatgcaatgcacattatcgatgtaacgtcagatacttgggaacaggttgctgtattacattctaacgagatttctcacttaatccttccggatatagtgcataaatacttaatggaatacaacgaagcccctgtgtatatcgaattgaactcgaccggtgtctccgttgcaaaatctctttatatggatcttgaatacgaaaacgttatttgtgattcaatggttgatttaggtatgaagcaaactactaagactaaagctgttggttgctctactttaaaagaccttattgagaaagataaattaatcatccaccataaatctaccattatggaattccgcacgtttagccagaagaaactttcttgggccgcggaagaaggcttccatgatgacctggttatgagtctagtaatttttgcttggctttcaacccaacagaaattcgccgattacgcagataaagacgatatgcgcttagcatcagaggtctttagtcgtgaattggaagatatgaacgatgaatacgcgcctgtggtatttgtagatgctgccgataatagtgcttcctatgctccaaaagagcctggaatttcattcgtataaataagataaagcaaatcactttgaggaataatcatggctttaatctctcctggaattgagctcaaagaaacgagcgtccaaagcacggtagtcattaacgctacaggtcgtgctgcattagttggtaagtttcaatggggtccggcataccaagttactcaggttactaacgaagtagaacttgttgacctgtttggtggaccgaacaaccagacagctgactattttatgtctggtatgaacttcctccagtatggtaacgatcttcgtaccgtacgtgttgtaaacgaagaggctgctaaaaacgcaagccctatcgctggtaacattgaatggaccatcgataccgcaggtactaactactctgtaggtgataaactgaccgtaaaatatctgactacggatgttgaaacagaaggtcgtattactaaagtagacaccgacggtaaaatcctttcggtctttatcccgactgcaaaaattatcgcttatgcgaaatccatcaaccagtatccagatttaggcagttcttggaccgttgaaatcgcaggaacttctgcgggtgtttctggtggtattagcctaggtaaaattatcgttgattctggtattctgttgaccgatacagaaacggccgatgaaaaaattactaataccaccttccaaactgcattatctaaatatggtatgcctggtgttgtggcgatttatcctggtgaaatcggttctactttggaagtagaaattgtttctaaagctacctacgatgctaatgcagtttctctgttagatatgtatccgggtggtggtactcgcgcgtcaacagccaagtctgtattcggctacggccctcaaacaccagatcaatatgctattatcgttcgccgtgacgggactttagtagaaaatgttatcctatccactaagcgtggtgataaggatatgtacggtaataacatctttatggatgattatttcgccaacggttcttctaagttcatttttgctacttcagaaggctggcctaaagatttcagtggtattattcagttaaatggcggtgtttctgctaatgaatctgttactgctgcggatctgatgaaaggttgggatctgtttggtgatcgtgaagcactgcgtgttaacctgcttattgctggtgcatgcgccggtgaagaagctgaaatttcttctaccgtccagaaacatgttgtttctatcggtgacgaacgccaagactgtttagttcttatttctccgcctcgttctgctcttgttaatgttccgctaacgcgtgctgttgacaatctgattgattggcgtgaaggtactggttcttataccgattctaacatgaacattaataccacgtacgcgacaattgacggtaactataagtatcaatacgataaatataacgacgttaaccgttgggttcctttagcagctgatattgcaggtctctgtgctcgtactgacacaacttctcaaccttggatgtctccggctggatatcgtcgtggacagatcctgaactgcattaaactggctattgaacctcgtcaatcggcacgtgatcgcatgtatcaggtgggtattaaccctgttatcggtcaaggtacaggtgaaggtttcatcctgtttggtgataaaaccgctactacggttccaactccgttcgaccgtattaacgttcgtcgtctgtttaacatgttgaaaaccaatatcggtgatagttctaagtatcaaatcttcgagctgaacgataacttcactcgttcctcgttccgtatggaaacaggtcaatacttagcgaacattaaagcccttggcggtgtgtacgatttccgtgtcgtttgtgatactactaacaacactcctgcggtcatcgatcgcaatgaattcgttgcgtcgttctacatcaagccggcacgttctatcaacttcattactctgaactttgttgctactgcaacgggtgcagatttcgatgaactgattggtgttcaacaataatataatcacctaccggaaagacctgaagtcattatactatggcttcaggtttagcaataaatccgtaggacgccgccaggcgaatcctttttataggataataaattatattaaccacaatttaaattatccctggcgtccacagacacttccaggcgatataaataagagagattactgatggaattaacagacatcacacgtgctttcgaatccggtgacttcgctcgtcctaacctgtttgaagttgaaatcccattccttggccgtaacttcagcttccagtgtaaagctgctactatgcctgctggtattgtagaaaaagttcctgttggatatatgaaccgcaaaattaacatcgctggtgaccgtacattcgacgactggactatcacaatctataacgatgacgctcatgaagttcgtaaagctattattgcttgggctgccatggctcattcccagggtaacgaaattacgggttctacccctgctgaatataagaaaactgctaaagttcgccagttctcacgtgacggtaaaactgtcactaatgaacacgaaatcgtaggcctttggccgaccaatgtgggtgaagttgccctcgattgggatagcaataacgaagttgaaacatttgaagctacctttgcccttgactggtggctgtaattctggtagggtcttcgggccctatcgctatttcttaagcgaataatcttacgaaataacgatataaatagtagtaagaatcattattggagaaagtaatgaatttcaacattctaagtttattcgctccgtgggaaaaacacgatgagtccgaatataaacgacaaattagagacgatttagaatccattaccggacccaaattcgatgatggagctcatgaagtagaaactaatgagcaagatgccccgtataacgcgtttaaccaaatgatgtttggtacgcagttaccgggaatgaaaactactcgtgagcttattgacacttaccgtagtttgatgaacaactatgaagtagataacgcagtccaggatattatttcggattcaatcgtttatgaagatggtcacgatgtagtatctttaaatctcgactctaccaactttagtgcaaatataaaagaacgaatgatggacgaattcaaagaaattttgaactgtcttgattttgaaagaaaaggtagtgaccatttccgacgttggtatgtagactcgcgcatcttcttccataaaattatcgatcttaagcgccctagagagggtattaaagagcttcgtcgtttagatccacgtaaccttcagtatgttcgtgaactaatcacaaaagaagaagccggtgttaaagtcgttaaaggctataaagaatactttatctacgatacagctaacgaaagctactgcgtaaataacaaagtttattctgccaacactaagattaaaattccgcggtcagctattacgtatgctcattcaggtttagttgattgctgtggtaaaagcattatcggttatcttcatcgtgcagttaagcctgctaaccagcttaaactcttagaagatgcattagtaatttaccgtatcacacgtgcgccggaccgccgtatcttttatattgataccgggaatatgccttctcgtaaggcggcagcccatatgcagcatattatgaacacaatgaaaaatcgtgttgtatatgacgcttctaccggtaaaattaaaaaccagcagcataatatgtctatgactgaagactattggttgcaacgacgtgatggtaaagcagtaacagaagttgataccctaccgggtgccactaatatgagcgatatggatgacgtacgttatttccgtgcagctctttatatggccctccgtgttccattatctcgtatgccgtcttctgcttgaaaaaaaaaaatacagttcgatgccggaaccggtatcacacgcgaagaattagatttccgtaaatttatccgagatcttcaacataagtttgaagaaattctgcttgatcctctgaaaaccaatcttcttttgaagaaagttattacagaagatgagtggaataaagagataaataatattaaagttgtgttccaccaagactcatacttcacagaaatgaaggatgcagaagtgatggaacgtagaatcaatatgctaaccatggctgaaccgtttattgggaaatacatttctcaccagtacgccatgaaaactttcttgcagatgtctgatgaacagattgatcaagaagctaagcaaattgaattagagtctaaagaggctcgtttccaagacccagaaaatgtagaggacttctaatggaagaattaatggaagcaattaaggctaacgacctcgttgcagtacgtaaagccgtggctccactgctgcaagaacggacgtctagtttaattgaagagcttaaagtcaaaattgcaagctcagtcatgatcgaaggcgaagaacctgaagaagattcggaggatgacgccgatgacgatgacgatgacgagaaaaaagaaaagaaaaatgatgacgacgccgatgaaggcgacgatgacgatgacgacgatgaggacgacgaataatgttgatactccctgaaaatttcgaattagttatcgagaacattgaaagcaaaattcaagaagctcagggccgcatcgaccatttgtctaaagcattcgataaagacggtataaatacaattgtagagaacatgatggctagcgaaaccgaactggccatcgcaatgggtgctctcaatgaagatatgcaacttaatgaatttatcgttaagcacgtcaatagccgcggtgaagtgacccgccttaaagaccgcaaaactcgtgagcgtaatgcttatcaaactactggtctttctaaatcgaagcgtcgtcaaattgctcgaaaagcggtcaaatctaaacgggcgaacccgagcgtgataacccgtggtattcgcaaacaaaagaaagctattaaacgtcgtcaagcactagggctgagctaatgtcaaacgtcaatgaacaactcttaattgagaactggggaataccgggtgaaatcattgatggaaaacctatgctcgaatcgtttgaacagccttcagacgggtcgagcggtttaaagccagggctgtatattgaaggtattttccttcaagccgaagtggtaaaccgtaataaacggttatacccgaaagctgtcctagagcgtgccattgaccggtatataaccgaacaagttaaaactaagcagtcattaggagaactaaatcatcctcctcgtgcaaacgtcgacccaatgcaagctgctatcattattgaggatatgtggtggaagggtaataacgtttatggacgtgcacgtgtcatcgaaggtgacaacggaccgggtgataaattggctgctaacatccgagcaggatggattcctggagtgtctagtagaggcctgggcacattaaaagattcaggtaaaggatataacatcgtacaagaaggttttcgcctgacggtaggtgttgatgcagtttggggtccctcagctccagatgcgtttgtagcaccacgagaaattcgtgagtctacagaaaaggtagaagcaactgccaagatgaatgctgataaagcatttaccgctctaatcgagagcctagaaaagcattataaataataatgtaacttaacaacaggacaccaaaatgcttaaagaacttctgatgaccgaagctcagactattgatgctaaagtcgaactagatagcattttcgaatcagttgaactgtctgccgatgttaaggctaagtttgaaactgtttacgaaaccgctgtaaaagccgccgctgtaaagctggctgaatctcacatcgaaaaaatcgccaccctggccgaagaaaaagtcgaagaagaaaaggaaaaagccgaagaaaaagctgagaaaaaaatcactgaatctgccgctaagttcctcgaccacgttgccaaagaatggcttgccgaaaacaaactggctgtagatcgtggtattaaagctgacttattcgaatccatggttgtcggtctgaaagatctgttcgtcgaacataacgttgtggttccagaagatgctgtagatgttgttgcagaacttcaagaagaaatcgctgaacagaaagctgaaactgcgcgtctgtttgaagaagtaaacatgcgcgatgcttatatcaattacgttcaacgcgaaactgctatgaacgaagctacccgcgacttaactgaatcccagaaagagaaagttatttctctgactgaaggtttggaatattctgatgcattcggtactaaactggccgccatcgtagaaatggtacagtcctccgctgaagcttcagcaattgtcgaaagtgctgatataaatactattgacaaagatgctgagggtcttaacttcactgtcgaagctgtagaacccgaagaaactcctaaacaatccggtggcctgatggctgcatatgtcgcttcagcggctcgtatttcttaatttaaaaaggttattaacacatgaaaactaacaaactcgtagaaaaatggactccgctgcttgaaggtgaaggtctaccggaaatcgttggcgccggtaagaaagcactgattgcaaaaattatggaaacccaggaagcagctattcagactgaaccggctttccgtgacgaaaaaattgctgaagcttttggttctttcctgagcgaagcagaaattggcggtgaccacggttacgatgctcagaatatcgcagcaggccagacctctggtgctatcactcagatcggcccggcagtaatgggtatggttcgtcgtgctattcctaatctgattgcttttgatatctgcggtgttcagccgatgtccagccctaccggccaggtatttgcactgcgtgcagtatacggtaaagatccgattgcaccgggtgctaaagaagctttccatccgatgtttgctccggatgcaatgtattcaggccagggtgctaccgctcagggtcgtgcattcgctgaaattaaagcaggcactgaaatcaccgaaggtgatattgttaagcatgtattccaggaaaccggtattgcttacttccaggctgttgaaactgtaaccccgggagctgccgctgacgccgctgcactggatgcagttgttatgggtctggttgaagctggtaaactggctgaactggccgaaggtatggctacttctattgccgaactgcaggaaggcttcaatggttctaaggaaaacccgtggaacgaaatgggcttccgcattgataagcaagttatcgaagctaaatctcgccagctgaaagctcagtactccatcgaactggcacaggatctgcgcgctgtccacggtatggatgcagacgccgaactgagttctatcctggctactgaaattatgctggaaatcaaccgtgaagttgttgactggatcaactactctgctcagcctggtaaaaccggcatgacccagaccgttggttctaaagcaggtgtgttcgacttccaggatccgattgatatccgtggtgctcgttgggccggtgaaagctttaaagctctcctgttccagatcgacaaagaatctgctgaaatcgctcgtcagaccggtcgcggtgaaggtaacttcattatcgcttcccgtaacgttgtaaacgcactggctgctactgattctggtatcacctatgctgcacaaggtctgggtaaaggctataacgttgacaccactaaatccgtgtttgcaggtgttcttggtggcaaataccgcgtctacattgaccagtatgctccgcaggactacttcaccatcggttataaaggcagcaacgaaatggatgccggtatctactacgctccgtatgttgcgctgaccccgctgcgtggttctgatcctaagaacttccagccggtcatgggcttcaaaacccgctacggtattggtattaacccgttcgctgattctaaactgcaagctcctggtgcacgtattcagtctggtatgccgtccatcgttaacagcgttggtaaaaacgcctacttccggcgcgtatgggtcaagggcctgtaattttaaaaacctttatgggagagctttcgctctcccattttagtttttgtagcagtcttctttaccatctttaatccaatttcgaatagttgcacctgttacattaaagtacatatacgcatgcgcgtgtaaacagtataaataaaacatatacaccctataaggaacgtgcaatgagtaaaattcataaacttctgcgcgaatcaactacgactcaaagctcaatggttgggcgtccgaatctcgttgcattgactcgtgctaccacaaaattaattttcagcgacatcgttgcccagcaacgtactaaccagccgattgcggcgttgtacggcgttaaatatttgacaccggataacgaattatctttcatcaccggtgcaacttattcaggcgcagttggtgttgaagcccgtaaaaatattccagtatttgctgttggcgattcctttaataaaggtgatctgttccaattcgaacacgtcgtctataaagcaatggaagatgctccttttactggcgctaccggaactactgaaactgaacaattgtcagaagcccttattcttcttaagattcgtatcgtatctgatgcagctaatgtagagcattttgaaaaatcagaagatattgcagaagctaaattccaagttaataaatggaacgctgctgttaagtctcgtaaaattaaaagttctctgactgtagaattggctcaggatatagaagcagcaggtttcgatgcccctaatttgctggaagacatccttgctacagaaatggccgatgaaattaacaaagatattcttcagtctttgatgaccgtaagtactcgttataaagttgaaggcgtgtgtgacaacggcattatcgatcttaagtacgacaacgcccctgaggcggcacgtaagctctacgaactggtctgtgaaatggtttctcatatccagcgttcgacgtcttacacggccacctacgttgttgctagtactcgtgttgctgcattgctggctggttcaggctggttgaaacataaacctgaagacgatgctttcctgtctccgaatgcttatggtttcctggtgaatggactgccggtttattgtgacactaacaccccagcggattatgtcacggttggcgtgaaggaagactttggtggcaaagaaatggtgggttcactgttctatgctccatacactgaaggtctagaccttgatgacccagaacatgtaggcgtgtttaaggttattactgatcctgacagtttacaaccgtctattgctcttatggttcgttatgctctttgtgctaacccatatacagtagcagcagacgacaaggatgctcgtaacattgatgcatccgacatggacaaaatggcgggtcgatccgacatgtctgtactcctcggcgttaagttacctaaaattctcgctgaataaacaaaaacgggagagcgaaagctctcccgttaattttagtttgaaaccaattcaatccatgcaggacgaagtacgtcttgtactagtttagtaatttctttcttcacgatatcaggctgttctgcttgaatgacttcaagaccttctcgtccagcttcaataagaatatcttgaactgtcaagcccatgacctttccaaagtctttaggtccaacctgaccaatcttactaataacgttatttacacgctgaatagtaacgtattcagagaatttctgcagaacctcttggtcaatttcactcagaacagctttaggcttaataggcttatcagatttagctttttcactgaacttagagttcttacacttgatagcaacacggctaccattagccaggaatcgtggatagttaggcttcagtacataaccttctgccgtgttatcagtggcttcttcagccgaccagacgcgggtattagcatttctgagatctacttctgcggcttcgttgtaacgattaacgttaatctggaactcattaggcagtttaatcagttcatcaaatgaaccacggcccatcagaggcgcaaccttgaaaccaaaggtgcaacacatctgttccatcataaagtcatctacgaactggttagtacctttattggttttaaccaagatatcaaagacatagaagtctttctcgccgtaatcgacacctttctggataccgccaccagcgaattcaccgaagatctgcatactagagccttctttaattgtattttgtacggctttaatagagtcgttatatttctttaaaataacagtgtaaccaaagaaatcttcagctggaagaataggacctgtgcgcttcgcgcatgtgactgcgtcacgttcaatgataatagaaaagttggtaccatgaatcttttcacgtgcacaccagccttcagttacatcataaccgtggtgtcgaatcttttcaataaatttattattgtagtggttctcaagactagaatatttctcaaacacatttcacctctaaatatcagaacaaacataattaaaagagtaaagacttctaccgccagtactcttagcttaaacccattataccaaatatatcacaaaaatttttaaagcatattagaatgtaatttctacccagtcaccatcacgttggtcatgcttccagttaactaccacaccatcgtcttgcatccatttaatcagctggtctttatatttctttgccatcgaggatggataccaattaaagtgacgtttgcctttcagagcatgagctttaaattccagttcaacttcgtctttagcttttttcaattctgtagtagcgacagagtccgccagggcaccatagtgttctactaatgtagaaacacgtggctcgttaacgagggccttcaggccgccaataggttgccctgattcgtcccatccttgaatacgccgagattttacatccgattgaaacgcagaatcatgcattataacacctcattttttcaactaatttagtatggtctgtaataagccgtttacgataaattactttttctcgagccttggctcgctctctggctttttcgacttttatccattcctgcatagcttctttagcactgataccaaactgtttagcgatgtcaataaaactagtaccagtttcatgcatcatatgaatctttaacgcttgcatggttagctccactttgtgatgatggggctattaaatcataaaagttttaaagctaactctgctgcctttagatgccagtatggggccgaagccccactattagtagatatagtcgtagattattccaacatcaagagcagaccggtgaacaacacgaccatttctagattcttggacatcgacttcagggtactcttctagcattttagccagggtataccgatgcaagtaataatcgctgtcgggatcatccagtttccaatctttgccttcaagagtcattcgttggatttcatccattacccaccatccgcaccagatataagctgaacctctgaacgggagcggatgaacgtatggaagttctccgtcaggagtaggggctacccttttagtaatagttacattaccagttttagtgaccgtgacaggattgtaatcttctgctgaaaccacaacagaaacaccaatcacttgggatccgatgtcagatgttgtcgatcactaaagtacttgcagaaccttcaataggagagccatctttggtccatgaataagttttggttgcgccttccggggccccgataacattagctttaaaagacgcatcagaaccttgttcgactgtaatagactcaggagtcaaagtaacagaaacaccactcatagtctttttagtaaaaacaaccggaacactcttagtagcagtagctggtttataatctggtgcagaaactgtgacttcacaattcaaagtgtagttagcttctgccgattcagttaaggtaattgttttaccggtctgaccggaaataacggcagtaccacgtttccatacataagcaatacttgctccttctggagcaccaacaacgttagctgtaactacttgggattggccgatttctttagaaacagatgtcggactcaaagtaacagaaacaccgctcatggtctttttagtaaaagcaacagcaatgcctttagttgcagttccattattataatctggagcagaaacagttacttcacaattcagcgtataattagtttccgctgattcagttaaggtaattgttttacctgtttggcctgcaataacagtagtaccacgtttccacacataagcaatacttgctcctgctggcgccccgctaacatccgctgtaactacttgggattggccgatttctttagaaacagaagttgggctcaatgttaaagtaatagcaggcatggttttgttcttaaccgtcagagtagtttctgctttggccgtttcaggatagccttcagccggagtgaccgtagcaactactttaatagtcttactacctgcaggtcctgcagcaacataattcatagctgcagtaacagaagattgctttacaccatttacagtccacacaaatgattctgtgccttcgaccgcagcaccagacgtggttgcagtaaaattagttgtagccccaatgactgctgaagcagccaaaggagcaatagatacgctataagccgtagttggtccttattttaaagttacaaacgaagaattacgtgtttcacgaatcataatagatccgtttcttttgatgtaataaattaaactaaacagtgtctggtgtgcactggggtgtgggaagctggtaggtcttgatttccagtctggattgtctttaatccactcgtaaatccaccacggtaaagtcacgtaccctggatttcggcccatcagaataaaatgaggactaaagttttctggtagttcaaaagtagtttcgtcagcgataattttagatacagcttcttcaaaggtattttcagaaagcttagccttgggttcggagaattcacctataggcgcctcaatatgaatagctttttcttcaataactgattgatcttgaacgggttctttgatttcgtgaatagatacaggaatctctggagaatcaaataacaatttagcttcaggcttagcttcttcatcactgattacaaaatcattcctgccttcaagttcatcatcagcagcaataaggtcactgatactcagaccttcgttatcttctggcataggctcttcggccatctttttaaaagctgcttctatatctaagaccaggttttcaaagcctttactctttttcagttggatattaaatccttcggcatattcaataagtttggctttggcctcttttttattttcaagaccacgaaggtcatcaatatattgtttatccatagtgtctctctttctagtgtataaatatgtatgtatttataactgaggctatacgctgtggacatcaaattaaaatttcatgattttagtcacgttctggttgaatgcgatgaaggcatcttctatgaactaagagactttttctccttcgaagcagaaggctataagtttaatccaaaatttcgttatggccaatgggacgggcgcattcgtctattaggttacgacagattacttccattcggtctggtgaaccaggtacagaaattcgccaacaacatgggttataaagtccatgcagaccctatgatttttgagaaagaagaaatcactcaagaatcttttgataagtggctcgattccaaagaaatctattctgggctgaccaagattacaccccattggtatcagaaagaagccgtgtttaagggtcttaaagaaagacgcgcactgctgaatttacctacatctgcaggtaaatcattgatccaggcactcctgagtcgttattacgtagagaactatgaaggcaaaattctaataattgttcctactaccgcccttgtcgaccaaatgatcgacgacttctgcgattatcgcctgttcaaaagagacaatatgcttggtatcagaagtggtactaagaaagattcttctgcagtggtttatgttagtacttggcagacggctattaaacagcctaaagaatggttcagtcagtttggtcttatgatgaatgatgaatgccatcttgcgacaggtaaatctatctctaccattatcgccgggttaaataactgtatgttcaaattcggactttccggttctttgaaagacggtaaagctaatttgatgcagtatcaagggctgtttggtgatatctttaaaccggtatcaacatcccagctgatggaagaaggcgctgttactgaacttaaaattaacgccatcagacttcggtatccggataacgttactgttgctttgaaaggtaaaacttatcaagaagagattaaatatatcacttcagttaaacgccgtaataaatggattgcaaatctagccgttaaattagctaataaaaaccaaaacgccttcgtgatgttcaagaacatcagccatggcaaagaattgttccagatgattaaagacctgggacacgacaaaatattctatgtatctggtgaaattgatacagatactcgtactgctcttaaaaagatggcagaaaacgaagccggaattattgttgtcgcatcgtacggcgtgttctctaccggaatcagtattaagaatctacaccatgttattttagctcacggtgttaaatcaaagattatcgtacttcagactatcggtcgagtacttcgtaagcatggctctaaagatgtagcaacggtttgggacatcatcgatgactgtggtgttaaacctaaatctgctaatgccaaaaagacttacactcatattaactatttgctcaaacatggcttagaacgtatccagcggtatgctgatgagaaattcgattacgtcatgaaacttgtcgaactctaaggaaccactatggactttaaacaatttttatacgaagccgccattgaagattttatgtctaaagtaaactcttgccggacccttgatggccttaatgagttggaaaaatattacaaaaagcgcgtaaaagaagctgatttgaaggattctgatgatatcactattcgtgatgcattggccggtaaacgtgcggaactggaatctatcgattctggtgaggaagaagaaaacttctaatctctagatacaaaaaaggctctccttacggagagccaagaataaccaataaggttacacactagattaaaagctgcacttcgttaagttgctgttctgtattctcagtaactggcatctcaactgcatgattatagcattgaccgggatgaaccggacctttgtctgattgaacagccaatacatcatcgattggagtcttacagacgacacaaatacacgacatggttgtctcctctgttaataaacttatttattaagcttcgcctgcttcgaatttacgaagatcaataattgcttttattgcgaatcctcgagctttaatagcatccatagcatcactacagaactcaagcagaataccccagtactgaagtttggtttcagttcctaagatagtttcatctgcagccattacagtttttagttcagacttctcatacgaatccatacacacttcttcgccaggctctacacgtcccgtgtagtaatcaagccttttcttcatagcttgtttcttcatggcttcaatacggagcatttctttacggcatatagagtgcttacgtacccaccgcccgtagacaacaggattattggcagcttcatactgaagttttgtctggtcaataactaaatcccggtctaattcatcttgtaaatcttccaacttcatttaatcaccaatctcaatttaaaggacctaaaccattatacacactactgacgagaagcacgtaatttaatcttgatgcgttctaagacatccgggtcgtcgacgatagaaaacatcaccgtaacgaccacagcattatcatcatatagcgccaagacctcaacacgtaggcgttctacccgtggctcgtaggtttggatggccgatacaatattacgctggatagtatcagcagttaacggagtcatattttcgaacaactcatccgaaaggctacacccaaagtctggattgaaagggcgactgccctttcttgtagtgataatccctaagatgctattttttactgcccttgcgcctacagttcttgcaacgtctttatcccaggccattctaaggtccgggtctaagtctgaatacatatggtctatattcattggataaccttaaagaactctttgagtccggtgatttggtgtacatgattcttcccacacttgcaagaaataggaactgccagctgtatctgtggcttcagtagcatatcttttattttcaggacatcttcggtagttatagcagaataaaggtcatctatctcttggtctgataaatcgtcaacaaagatctgctcaccgttaacaataatgtaatcgatagatttagctatcattaaagcgatatcattatcatcaaataattcagggtatttgaactggatacgaagttcgcctagggaatacaagagatcactagagcccacgatttgaatacggttagtattaattggcacgtcgatttcgttgccacactcgcacacccaggtggctgtatgattaacttcacctaatgaatgggcccacagattaactagaagaagttcagattcatgtttatttaagcctttagcattagtacaatctttaatcagctgcttaatcgttttatcaagaaccttatcggctttagcttttataagattcaaatattcttctagtgtaaatgcacggcaagaaatatttttgccatttatagttaggtcaaaattatacgttgtcatatgttacctctagacgtatttataaatacaataaaataagaggactccctatggctaatatcgtaagatgtgaattaccagacggtgttcatcgattctctccgttcacagtctctgactatagagattttcttctggtacggaacgacatgaacactaagtctccagaagatcaagaaaaacttattgaagaactccaaaacgactacttcagtgacatcccaaaagaatacagggcatttgtgttcttaaaagtctatttatctagcataggtaagactaaaatcccggttaaggttgagtgccctaaatgtggaaaagctaaaatggtgatgattaatttccaccaagaagcagttgaacttcctgtagtcgaagtgtccgggcttagacttaaatttaaacatccgtctaaaaactataaagaaaacatagccgggctagtaacagaaaacattttgacagtagaagattctaacggagtctatcagtggtctgagctgtctacagaaaacaaagttcaagttgttgaagctattgatatagaaaccttagaacttataatcaaaaaattgaagatatttgactttgtactaaaatactcgtgctgcgattctcatgagatccattacaccaattttatggatatctttaagcttcttctgaacccggatgaaatatttacattttataaaatcaatcacttgatagttaaacaaggctacgacctttcttctgttatgaatatgattcctatcgagcgaagcatcacgttatctctgattgaaaaggacctagcacaaaaatgatttcacaacgccccggatttccaaatgttagtattaagctttatcaaaactatgataagtggcttgataatagcttcgttgaactcggcgccacatttaccaccttgaccatgagagatagtttgtctggtattaatgaaggtatgcttcagttctacgattctaaaaatattcacaacaagatgaacggagaccaaattattcagatctctgtttctaatagcaatacatcgagaacacaaacacgaatctatggaataaaacatttcacagttcgagtcgatgataagggcgataatattatagctatccagcttagtacgctccatgatataatgaatttgaagttcagccgttgcttcttcagttcagcttatgaaactctggttgaaatgataggtgtgatttaccaaaaatatcctaagctggctccgcctataaacggaataaacacatatgttcctaggattccttggacttctaatataaaggaattcatgcaatatatccgtgacgtaggtctatctgtagaaagcgaccagtttgtttttgcttgggaagacataaccggtataaacatgatggactacaatgcgatgattgctcagaacccagcatcttttgttgtcggtgcacctcagactattgggcaattcgcagaccagttgccagtatctttagcttgggattttgaatggcttgtaaaagctaacgcttatactagaaacccgttcaaagacgctacattctatgcccaaagttttacagataaagaaatcacaaaaataactgtaggtgaaggttctaatagtatctatattaatagaagcggcggttattcagaaatgatttatcgtaatggttacgaagaagctaaccgcatcgttactatgtctcagtacgatggctacgcgtctgctaaaatatatggtaactttgaagtgacccctgggatgaagttaaacttctacgatcctaaagaacagttccgtactgatttctatgttgatgaagttatccatgaagtcagtaataaccattcaatcaccaacatctatatgtttactaacggttctactatcgaaccagttcaaatagcgaaggtaaaaaatgaacttaaacgtgattctacctattaagaaaattacaattgatggtattgaaatttcattacctaagcttggacttaagcaccacaacttaatgaaagaagtaaaaatgccggacgaaaatctggcaattcttttagattctattaaaccaggtctagatgccgtacaaagcgatattgttctattacaacttttggcctttaacggtaagattaaagaagaagttgaaaaggatggattcacttatcgcttatcagatgtgtatggatgtcgtatattaacgcaccgtttaaacggtcaagaatataaatttaatgcccccgaaaggtttagtaaattcggctcggctgacgcaattcttgacaagtatttttcttctgtagacggcagaacagagaagcctgattttatgaagcttccagcattcgtaattaaatgggttgacggcatcgttaacactgtagctattccgggtcctaatgggcctataaaaggaattggtaatataataaggctctttgaataatggctagaaaagtaaacagtaaaacacaatctctgcgtcgggtaatcgccgacgcagcaccacaaaaacgtaacgaagcactacaagaagaacaaaacaattcactaggcactattaatggaacccttgaagggatccaagctgctgctgaaatgggtgccgaagctacagagaatggtcttgctaatgtaggaaattctttatccgatactaatgctggcatcgaacttcaattagatgaattaagtgctcttaataccacagcctctttaataagtgacagaatcaataaattggctgaaaaactaggagtaaaagtcgaacaagcaactccgcagacagcaaatgttccgtctgtcgaggttgtacaggattctattcctgagccggttccggagattccatcgttagacgatcttcttcaagaccttattccaccgcatgaaaacagacgtccagattctgatgtattaccacaggaagaacctaaagtaattccaaaaaaggaagatgaggaaaagaacaagaagggtgatacagaccttcttaaagcccttttagataccactaaatccgggtttaagaaatcaatttcgttaactgacagaatttccagtatgctttttagctatactgtgacagctgttgccaatatggccaaaacagccgctatggttttagctttgattatggctattgatattatcaaaatccatttcaaatactggactgagctgttcaaatcaaactttgaagagttcactaaattggccgggacttgggcacctgtgttaacagctataagtgaaatggctcaaagcattcaagatacttttaatgaaggttcttggttaggattagctgaagctattgttaaaggcctgattaatgttttagatactttgggtgaaactattatgtttggcctttctaaattggtcgctgccattcttgataaagtccctggtatgggcgataccgcagataatatccgtggtgcagctgcagattatttccagcgtcgtaccggagccgaactttctgaagaagaccaagattatgtagctaaatataaagataatcagcgcttgaaagaagagcaggattctccgatggaacgtaaaattactgcttggggcgatagatatttacttggtaagattgatgatgctgaatacgaaaaacgtatgaaattagctgattctgatactaaagacccggcctttgaaggtaaaacccgtgaacagcgcttagagatgtataaagcccaaggcaaaatgcaggctgaattaaaacgaacttctgaatatgctcagaacactcgacctgaaaataccgagcgtatggagtctgccgctaacgctgttgctaaagcttctaagaacttcgaagagttcaagaagaataaccctagtttagctaaagaactagagccccagtatcgctttatgcaggatgagtggaataaaaaacgattcccgactgttagtccagagccggcagaagacaagcaagaaactcagcaagttaaggttattgagaaaatcgaagcccagcataaagttggtgataaactagcttctcaagcttctgtgaatgttaacacagccattaacaaaaataacactaccgttatgcctatgcagccggttactagttctccagctccaggtatggtcggatttacaaaatctaattaaggattctttatgtttttcgaagaattaaaagatgggctagagaatattaagaaatccggttctaagatttctcaaggtacatctaagcacactttaaaaaatgctgccagcactgtgacagctcaatacccggcagaacgttctgccgggaacgattcaagtcaagacatgagagttcatgatttgtatcagaacgggcttttgtttactgcatacgattttaaatctcgtgtttctccggacctacgagatttccgaagcgccgttagtaaatcatctgtttttgatgccccggaaaaaactaacacaggctcccagagactttctaaagcccctgtagctaacatcctgttgcctaagtctaagtccgatgtagattctgtatctcacaaatttaatgacgtaggcgaatccctgatcacacgaggcggcggctctgctaccggtgttttaagtaatgtggcttctaccgctgtattcggcgggttagaatctctcacccaaggagtgatggcagataaaggggaacagatctataatactgcccgcagtatgtatgctggtgcagaaaatagaactaaggtttttacttgggatcttacgccaagaactcctcaagatcttattcaaattgttaaaatctatgagatcttcaactattattcttatggtgccacaggaacatcagactttgctaaagaagttaaagaacaaatagatgaatggtataaaagcactttagagtacgccactccggaagggtcttctaaaagcgggactgtgtttgagtctattacttctttccttactaatgtaattgttgtaagcaacccaaccatttggacggttcgtaactttggatacactagttcttatgacgggagagaagatatattcgggccttgccaaattcaaagtcttaggtttgacaaaactcctaacggtcatttcaatggtctggctattgctcctaacttgcctagcacttttacccttgaattaaccatgagagaaatcttgactttgaaccgtagttctctatattctaaaggattccaatcgtaatgtatactttagatgaattcgtgacacaggcggctaatagcgattttcagagaactaacatgttctctgttatttttgctacggcgccatcgagtaaaactcagactctactaaatgaatttggtggggaactttataataacgtaggtcttaatgacaactggcttggattaacacaaggtgaatttacgagaggtgttacatctcttattaccgccgggactcagagattggttagaaaatcaggcgtaagtaaatttttgataggagcaatgactcagcgcactatccaatcactattaggggaattcactgtagggacctatctgcttgatttctttaatatggctttccctactacaggattattgatccactcagttcagattcctgaaaatagattagcccatgaaatggacaccttccataacagccctaacatcaaaatcactggacgagaatatgctccgttggttataacgttccgtatggattcagaggccagtaatttccgtgctatgcaagattgggtaaacgctgttgaagaccctgtaacgggattaagagcactgccttctgatgttgaagctgatattcaagttaacttgcatgcccgtaatggattacctcacacggtatgtatgtacacaggatgcatccctgtgggcgtcagtgcaccccaatttagctatgaagataataatcagatagctacgttcgaagtcaccttcgcttacagagttgcacagatcggtgctgtaggtaaacaagcagcattggattggttagaagataagactgttcagaagattgatactattaacccaaatctaagtgctcaaggattaggtagtatttcaagtagattaagccgtgttgcaggcgttgggaatggacttagtaagattttaacctaaaaaagggagcctcacggctcccttaggggtttatttacggaaaccaaaaaacgcggtagaagtggcgattaagccagtttcatcagcaacctgaatttgtaccggagcttcagattcaagctggccagatataataccagcaaagatagtatctgtttggtccgggttggtaaagttctgcatcggggcgaaagcaaagagtttatcgccatagattttctgcaactcttttactacaacttcattgaactcttctgaagcagggataacgtcatcgatagaagcttcgataccatttaaacggatgaatgaacgcattttgatttcctcatttgtttgtgtaatacagactataccacatccgtgtggtgttgtaaactagccttgtacaaatttttccggagtatcttcaatatcgataaacgaagccaagatgccaaggatattccgtttagtagtcaagaacgtagaagcactgatatcagtatcttcgccgtcaacagtaacgatagtaccagagcctaccggaactaattcaccggattctaccaagacgtcgccgttgtaaacaaccatagattcttcaatttggtctgaagtcataacctcagcctgaatgaatttttggttatcatgaattatgccgtcagaataagatgcatctacaatcttattaatttgaagcatagtccctcgcggcaagataacttccatttcaccagacatattacttaagtcgcctggataaacgacgttggttttatggccgccttcaatagcccaaccgatcataactttattaagttcggcctgcttacggttatcgacaacctcgccttcaccgttagtatctacctcggcgttaagccaactggccggtttaactgtttctgcactattgccaggagtgtttaaaacagctctagtattatctgaagtcattgctacagattgattacctttccagccaccaaaaataataggcatcaaagacgtcgaaacatagttccggaaataaaatactctatttttaacaagagattcaaaaataggctgacgaacagtctgagaacgccataaggtaagtccttccggcaaccggtcacctctcttaaatgcctcatcaaggtttttaatagccgttgtaacttctttagcacttaatgtatcatagttgtcttctgtatatcttccaagaagcatattattgatatcagtgtacccagaacctacgtattctctaattccacgcttttctgcaggagtatactgggcagggctgcgaatcattgtaattaactcaattcctgaagaaacatttttggcatacccttggagagctgatttgattagtttggtccgttcaatgttccaaagatttctggccatagcttcgcgttcagactgttccaggtactctggagtacgagtcataatgtgctccatggcctcgtattcacgttcggctaaagcatctaaaagagtctgggcataagcctgcatgcttttaacagaagttaacggggcatcaccgattcttttaataagctctttagagaaatattcttcaaattggcctcgttcgcttagtttaatcgtaatcaaagagcttaattggaaagctgcaccttctgccgctaatttcgcggattgagccctagaagctttagaactgacagagtctaatatttgggccgcttcaggaatttcctgagcagtactaggcttaatgaattctatagcagaagcttcatattcttcaaacttagaagggtccataatcacatcagtagaaagagcttggctagctgcaacctgtcgtctagaaattttagtacgtcgaataactgcgatatctgtacgagttttctctacttctgcaatagagccggcgatagcttcatctttagtgacttgaataccgtctttcttggatacccatacatcacctacagcagaatcaactttagtatatagctcagtattgataccaggaatcccagagatgtcctctaagggcttatttttacggtaaataagaatatatgtatgtttaccggtaaagttatagagcgcatccaggactttaaatttaccaccagtacgggccatacacaggcgagcaattagacgctgcagaacagggccttgacctttcattttcttggtcgggaaccggaacatcacagcatccattcttagctgttttacctgctcataaaccgtatcaaaaattgtattaattgccccgattggattactacccaagccgcctttaagttcggctggggcccctttagcactaagcgacatcaaaattacatgggcgtatttgtcgcccattttaacttgtttaatagcatcgccttcagattggtatgataccattctagctactaagttttcatttccaggtactttaatagcccagatctgcggtactttagatttcaaattcaagttcacgacaggatagttcttatcgctatcagagtcgaaaacttcgttaagttgttcagacatagttattccccttataagatactactatttatgccaaaaaggagcccgaaggctccttaattagaatggccaatcaccaaacacttcttcaaaggtatcagctttttctttgtcaaatcgccaacctttaataattggcaagaacacgcctacagttccgtctttacggcctttagaagtcgtccaaccgttacattcacaatcggcgatacggtcaattaacttaccagcaatagcatcttgcatcaaagattcacggtcaagttcaccacgctggtcgataggaatcagaatccattcaccgtcaattttcttatgggttgtatctgtgaaacctgaaccacagtcagtagtaatacgtccacattcagaagctaggttaacaccgccaattttattcggatctttagagtgagcatagtacccagtaactcgtaaagcaatatctattactgctttgaacttgaactggttcttagagcgagcatcttcccacagaccatccatattcttaagaatgatgccttctagaccctggtcacgatatttctggtaaacagcccgggcttcttcaaggctattaacccaatggttttcaataagaataatctgactgaaaccttcagccataagttctaatgcacggaaacgtacatcatacttaaagctcttgagtttaccttcagaataaattacatccagaggaacgtaatcccagacctggaatttcataccttcggcttcttcaggagtaattgtgcccttcagagatttgtttgctaacccatttgaagtgctgcgatcaacaacagtttcttcttgttcttcaacaacatcgccgaacaagaagtctagagaatctttatctttgaaattggctggagcatgataaactagctcaccatcaatcattacaccaccggggtgtttctcgcgggcttctttagtcatttccattagctgctcagctaatttatcaagacctagataattgttaccggaacgagaaaagaacagaacaccgtcatcacgtacttcagcaaaacaacgagcaccatcagcctttagctgggcatacgccggaaacttaatatgctttttaattttagcttcgtcaaaagacgaagccaacatctgtgggtactcaggaatgaggtttttccaggttttattagcaatcgttgtacctgtgccacattcaaggtcccgcatcagaacacggcgtaaaacttctataatttccggagaaccatccgcgatatacgaggctaactcagcaatggccgcattacctgttacctttctaggagctaaagtaaactctgcgaaatccaagcaatcttctagagttaaaaggcctgcggcttgtgtgggttcaccggcctgcggccattttttgataccgtagttcaaacgacgagaatatgtcattctgaatacacgcttcagaagttcattattcttttcgcgattcataatcgctttcttttcgttggttgaatctgtagcagcaagttcgttaaggatatctaaaatcatttaattcgccttccgttataagtagtcttattataagctacttcatccagaagcagatctagcttcttatggtaagtaatcatagccctccggccattaactgtatcgcagaggtattcgcttatataaatgaacccttgttcaacgcactgtttaaagatttcttcatctttagcttgcctgaacaggggattttcgcgaaagaacatattaacgtgaccgaagtcacgtgtgctatgttttccatcaataagagtgtgaactacaaacatagttacctcagaaggttgctcttaaagcagacggacttttagcagtccacctgtccctgcaattgatgtacggctctggagtaaatgggacatacggacgtaaaggtgtttgggcccaaggcttatttttattagcttcttgggccttacggattacttcccaaatggcatcttcatgatctttacgggtcccaggagtacctgctattttatgaagagtagccaggttcccaatatcagaagaacgcttagaaatcatatactgaacttcggcccagtctttaacaaaataagcaccagttttctcggctctttcgccacgaggcataaagaacacatcgacatctgttcctttgaataccttcatggcagcttcacagtgagaaggtagatcatcgatataacaaacaatccgggacccgtacttttctttagcctgagaaagaagggcatccttagactctgaatggccacacatcaggatttcctggaatgcgccagggaacaaagagttcagattgaactgtctattcagcttggcatcaatactgttgcctagcgcagttatagctacaaattcgtagtctttcttgagctcattgatgaccttcaaggcgtctttatacgcggcaaggtaccgaataaagtcggagttattgtacttttccataagctgctttccagtagcaaggtcagtttggaaaatatctgaagcgcaccggaacttttcgtctgaaatcatctcaataatgacgtcagttttgataccatatttgtgtgcaaaataagccaggcctgattgccactggataaccacaccatcgatatcagtaagaataaccttcttcattagttaaatctcttagtttagatattttaaaaagctcgctttcagcgtgcagtgaagtattaccatcaacccagtttacattataccatggttcgatgtggtactgtggaattgcttctaaacaatagataacaactcctgggataccagagatgcctaatgagactgtatcatgtcttctaaagcgcatagaagtcctttaatttttcaaagtctacagatgactcgaagtcagttataacgatgtaatttccttgttcgagtcgtttcttcaggacttccatatagaagcctgatttaggcaacccagccgggattagatggatttcgccttgtttaaaaccattagctacttgaatcattgcactgtaacccagttaggaaattcaaagaactctggggcatctacgtaataaaccactttattactttcaacttcacaactaataacttcgatcatttcgttattcatcaagcaacgagccagacgcggagcttgggctttaggaacagaaacacgcatagtattttcctcagaacttagttttgaatttattaggctctttaggcataacggcgttatcaccgttgtcgtcagaataacccacaggacgatctgtaactaatttttccagacgtgcgttgatatagttgatttgcaaagagtcagcgccgttgataagacgaaactctacagggcagtacttatcgatgtacttacgaacagcatcaatagtaggtactttaccgtcgaaggtatcgctaatgatagtttcgatgcctttacgtttttcattccagaagcttgatacgatcatttgaattttacctctacagatgcggtagcttcaattttcagaacctgaacaactacttcagggacggcgttaagagcttgacgctcagcgaactcataagcatctttagaagtcaaaggacctaaaatagctttggagtctttgttaatggtaagaacgtaataaccggtttcttcttcagaaggagccaccacaggatctgtctcaatcaaatggaaacccggaatagcactattatacgcggtatctaagaagatacaccagtactcggaaagctcgccttcataggctcgaaggactttgccgcctgggatctcgatagctagaatgttaccgccttcatcagaatctagaaccttgaatggcagattagtaggattacagtcaacaaaaacttcagctattttgctataacgacctaagtattcgttgaacttctctgtagacagtttgaatgttttaccagtaacgttcatagtaatttcctcaaaatccggggccgaagccccattaaaattaaccgataaaggtccaatgagttaaatcaataacacctttagctttcattttttcgatcagatcatcagccacttggcggccgtttttgtagtacgttacatcttctgagtagccgtcttcttcatcttcgtaagtctcagaaacaattttaccgacgatgatagttttcagaacatactcttcacctgtgaagaagttagtcaaacgaattttccatgagaaatcgtctgaagggccttcaggagtcatacagtagaccagttcgaattgctctttggtaagcatccactgggcttcatgaactacctgggctttatagccgtcgtggtctttacacttaacagtagcattcagattgattttcattttattctccggtttgttggtgtaagagtactataccacaacctaaaggtgttgtaaacaccgctactaaaacaaaaaagggactcccataggagtccctaaacttatgccttcggcttaccaaaacgagaagcatcgtcgcgaagaactgcacgagctcgacgcatgattttctcaaccgtctgattgatacgcttgttcgactcacgcttgtagccagcgcgtttagaggtaccaacaacttcttttactgcagtttttgcttttgcttgtttagccattataaagtcttccagcaagccctcaaggggaacagtgagaggactttcacctctcggtttaacttgcctttcgacaacaatataaactcttatctgttgcacaccgttagcttaaaggttccgggtccgatttatcggggataagatatacaccgatggatgtataggccttgaggcgtactcccgattggccatcgcctcggggtagcatgcacttgccgtttattttctagctgcactttggtagcaaatcaccgttggtttcggatgttttacgtggggataaccaacaacgtccacatcatacgttacccatgcgtacacatggtgggcgtacaaattacttcaatgttaccacaaagtgacgaacagctttatgagccttagcacacagcggcttagcatatttcagttcatctttagccgccagttcagcttcaagagctttctgggccggattcagatgtttgaaataaccaagcagatcaagcattgctgcttcgacgtcgatggaagcaccgtagttctcgtggccgttgttccaggattgacgctggatgtcaagtacaaatttgatagtatctttcattacagaacctcaagtgaggtgaataaaaggtggagccttaagacccattcggcttaacgcatctccaccacatagaagagtcatctcttcatacttttatttatatcacttgtaaacacaagtcaaatttttatagtgtacagtgacgaatttctgtttaatatctttagctttagctataccagcagcaaccaaaggatgggttacgtgtttaatactacctaaaggagtaggggtcagatcaccgacttcaacgaaacctttaggaacatcttcaccgatagaatagatttcgcacagttcaggaacttcgccttgagagcggcgttgttcaatgataataccaccagcagaaacttctggctcaccagcctgagcaggttcagacactaaaataacatactcaccaagagcacgaattggtaaatcagtcatagttatctcttttgttgttaggatagaataataatatcaaaacattcttaaagcatataacagattagccaacaaattggagcagatgttctgctttcataccgttaacagagatcagtttgtcgatgctgaatccacgccattgttttaattcggtatcaaacagaggaaccatatcgatggattctttacgaggcttagaaggattcacataactttcatagatctcggcgccaactagagaagaaactacatctttatcacgggtacctttcatagtacgaatagtgccgtctgctttttcgaaaactatatctgatacgcccatagatagtttgactttcagaacttcacgcagagcaattttttggtcagtagttaatttcatacctctaccttaataaagttaaagcgaacagtgaatgcaggtttaccgtcaatttctgtgaagtctttaacttcacgcagataaactacatccggattaaatttcacgacctcagaagccagatggtccaggtcttgggccttgaaagatgcaatatcaactttgtaacgctcaccacgttttatggtttgtacagaaaacgaaggggagtcgataacaattactttaataccggcggctttaagcatagatgcaaatttttcagttgcatctacaggctctggcatgggtggattaatatttacgacagagtcgaattcgttaagattcattattcaccacaaaaattacgaatctgttcccagttcagagagttaagattcttacggttatattcaataacttcaattccggcctcaatcagaatatcagcccagtcgtcaggagagcggtcataacgctctgcataaacaacctttttaatacctgactgagaaatagctttagtacaatcagggcaaggagacgcggtgcaatatagcgtagagccttcaattgaagaacctttacgggccgcgaacaaaatagcgttcagttcggcatggatttcatttttagaagaccattcactatgtgcaggtctgtgttctttagccaaaacaactcggccgcctttacccgaaattcgaccagacccagaattaggaataaacttggtccaaccttgctgtgcggcatggtcacaacagttagttccacccgccggagaaccgttataccctgtagaaatgatgcgaccatctttttcgataaccgcacctactttccaagagcagcattttgattcttgggaaatcagatacgcgatttgaagatacgtagcagccctcattttttatttcctcagtttacaattatcatagtgccatcgaacggcagtagctttattacatattttaccacaatgagggcaaggaggaactttagctttaggaacaccttttaatttttcagagatggcagctttttgactctcagaattcggtattcctgcccgtgtagcacatttggctctaagaactggattcttcattctatctctttgagcttttgccattttggctttagtctcttcagaacgaggaactccttttaatttttcggataaaagctttttagctaaagtgtaatctctagaagagactttgtatctttcaaccccgtgctcatttatcctagcattgcacatcattaaaaaggcataaatcatcggcccttcataaattttagctaataatttgtgagctaaaaagtgttctcttcctgttaaatcgactatgttggatttgtcgtcagaacctcccatagacttagggagtatatgatgagattctgtatacccagaaacttcttttctgagtgaggcctttgccattaaggcctcataagcttttctatagtccattcagattacggagaaccatttcagtggtttcccagtcaatacacgcatcagtaattgatacaccatattcaaggtctgtagaaatcttttgattaccttgtttaaggttagattctaacataattcctcgaacgttagccaattctgctgcttcagcacaaactgcaacctggttcaagaaagaaccttgggcgttagcatgagagcaatcaaccatcaagtattggttaacgcctgccttctgtgcctgggcgatagcatcaaagactgattctttatcgtagttagttccttcagaaccaccacgcagaacaatatgagtactcttgttacctggtgctgagacaatgcctaccacaccattttggtccatacccatatagtggtgtgggaacgcagccgattgcatagcgtcagtagcaaccttaatagagccatttgtcccgttcttaaaacctacagtcattggcagacctgaagcaatttcacgatgagtctgagattcggtagtacgagcacctattgcaacccaagagaaaatacctgacagatatttgatagtgaatgggtcaagaacttctgttgccagtggcagtcccattcgcaaaagcttgcgacacaaggtgcgagcaatacccagcccagtattaatttcaaatgaaccatctaagaacggatcattgataagacctttccaaccgacagttgtacgaggtttttcaaaataaacccgcatacaaagcagaagattaggaagttctttttggagttcagccaggcgctcaccgtaatcaacggcagcaactacgtcatggattgaacaaggccctactacaaccagacggcgtttatcgcgcccagtcataatcttatcgatttcttggcggtgtaaactgacttgattttgcagctctggagaaatcctacagcggcgctcaagttcagctgggcttatcattctttcaattaaaggtctcatattgttccttacttacattattctccaataagggccgaagcccttagaaagcatatactgaggtagattgaatatgactattaggcaatagttcaatcaagtagtactctagcttgaaacctttaacggtaaatagataagacgcaggtgtttcctgcgtcacatttagctttgcgcttgggttacgttcagatatcttattaatcaaagattgagcaaatttaggaattaactcggcaaactctgaagctgtgaaggtcttatcactgtacataaacattaacctcttgggtaccgaaaatgcctgttacttcaacagtgaatccaccgccgccttcaaagacaatttctacgactgcttgaacgccaaggctatttacttctagggatactttgccatggttcggaataagcgtattaatagcacttgtgaaatccgcatgcattttagctttcaaggcgttgtcaagagtatcagcacagtaattaccaacaacctgcaaggcaacaactttaactacttcagaatatttagggaacatagcttttccttaatgaacggtgtgtactttaacattaacaacgaaatgcgtattaacatcagaaagaggcaaaaactcgacgtggtactcatctttgtaacgagtattcaggtctgtacgaatacgcgccagttcattaatcaaagctggggttatgctcattccaacacatttccgaagcattttgtaagcttcttcttcaacttcatgatgcttattgtacatatcattttcctcaagtacaagtagactggaagtacatcatatcatgccttccagccgttgtaaactaccacttaactcggattgaatcgataagaccatagcgattaccgccttgatagaaaacctctacttcgtacccgagttcttcaaactggcgaatgatatcagccattttatggtgctggtcttcgtattctgtacgacgacctacgataccaaaatcagcaaaagggcagaagctggctgaaaagccaccgttaatagctcgacgagcaatatgctcaaagacatcattaggaatagtagtattacgctctgtaaaggctacagagagccttactgcatcacttgctttcattagaagttaccgaaattgacttgccaacactcaacgccaattcggcgccacatttctacgacttgatctcggtcgtcgacagccagcttcacatcgaaatgaggagcgattttgttccagaagatttcttctttcacaatcatatcacttctcgaatcgccttgttcacgctgacagagcattactgcagaaatacccatatcttcaatccaacgacgagtcatgtagtagtatttcataggctcttcaatagtaccggattcacgcccacttacgacaataacatggtagccttgtttagcgtacatctgagacaactctacaaccatcggattaataacgtctgtgtcacatttatccaagtcatacggagaccgtccgaccattttagccagtgtaccgtcaacgtcaaagataaccgcctttggcttaccaggcgtaccattgtaaacaggcttcttctgatactcacagaatttccagaacatttgacgcagaatatcaataggaacagcccggtcaccacgatattggttacgcctcagcagttcaagccaaggcacatcaaatacttggtacttaatagcccagttgtattcagcagcgaattcgacccagcgttgacgcgtatcagggttcaagttcgtgtcagagacgatcacacctttaacagaatcaccaccgtacaagatagtacgagcagtttccatctgcatcgaagttacaatgccttcgcgcttctttgagtacttgtattcattacgagcttcaagagccataatggatgcacggtagtcatcacggttaatgttgaaataacccgggttcttttcaatgtactgacgagcccaagtacttttacctgaaccaggacagccgatagtcaaaataatggttttcattgttctaattctctaaacatatttttaataatggtcttttgcgcatcaataagagataaatgccttttctcgcattcttgagaacagcctttctctacaagatcgcacagtgtaagccataatttatcatacctgttaagagcaagtaagaactggcgcatattctctgtcatttcactaacccgtttaaaaagttattcaatttagtagaagcttcaccccaggcttggtgtttatcttctcggtatttctttaaagctgggaaccgagagtattcatcgttcaaatcatggcgctcgcaagcccgaccataaataaggcatttcatttcaacttcggaaataagaccacgcagttcttcgagttgttctttagtcataacaagttcctcaaaattttatcatccgagtgaggccgaagcctcactgacatttcggctcttttaacggagcacgataataacatatcacgttattagattgttgtacataccgaagaatgtcgttagtccagatacggaaatcctggaactcggtgaacggcatgccgacccatttctgtccgtcgatttcatgcacttgccattcagcctgatattctttaatcgggtcaggccaagtagcatctactcttggcgcaggtttcacttcaggaatcgcctgagaacatcctaccagagcaagagataaacatacagctggtatcattcttttcatctggtcgcttcctggagctctctggcgaactcattaaatggatcgtttattatttcttttactgctttagggtctactaattcggcttcacgctttttattagcggtcaaggttttatcttttgcattacgagcatctatagcaaccttgttcttttctgtaagagcttggataccttgcagctgtgtagcaataagatcaatctgcagctgctgagcttttgctacaccttcaatctgggttacttgttcctttagtgtatctacacgataactcaagtactttgtagtaccaaatagacctgcaattagtagaccgactataatgtaaatttttagtttagacataactttttgattacctcaacaatctcatcgcgagacaagttgttgatgagaatatgcttaggagctttgtctacctggattttatagccgtcgagttcaagggccatatcttcgctggttttatacaaatgcttaatacctaagcgattgaacttgtcagaaagagggtcgcaaataacatagcatttatgaccattcaggtgaacattaggctgggtgatattgattttcacttcagccccgtacttagtcaactgattttcaagaaatgaacacatttcttctactgctgccggcattgcttctcggcgttcttcggcttgcttagttgaatactgtttttgcttaaactttgtagccagttttcgacccatggtaacgcgcaggtccgtaatgaatccaagtttcttttggcctttatagacatagatcccgtcatgagaagtaccttcgaagtgagcaacaacgtcatcattagaaatggtttgtaggttcattttggttcctcgtttgttggtatatgggtatcataacacgaacaaacgaggttgtaaactactcttcaatcattttgatttctttactataaagagcaggcacgtatttgggccagaccttcaagaaggccttttcaatacctttaacaatagcttcagagctcatagtacctgagtacatctgcatcataaggctgaacagttcaggcttaccattttttgtagctgtttcctggcctttgatggcgtagtctttacggtctcgcccgcgcatagcgttgtagtaaccttggacttctagcagtgcactagacaaatactggatgtactcgctttcaaatgctgcaattttagagacagcataagtatcaccatcaaacatagcacgaagatcatcggcagcaccacctacgattgcttcaaatagacgttcattagaagtaatcgagtccttggtatgatggagcaagcagtaccaatcagttttaagcttgaaccgctggccgctttcaagaacagcaatgtagccttcgataccttctgctttgcgggtttctttgacccaggcttcaccgtcatcaattacatgagaaggaatcaggtactggcgcagaacagcatcggcataaaggtcagcataaggaacatactcgccggtatcgttatgtcgcacgttcagcaggaagatagttggctcttcgtaatataaaacaacccggttgtttggggccgcgtattctaagttaaacgtatagcctttaggcgccagttcttccatcttaagatacaaaggaaggtacttatcttggtacagaagacgttcggcagcaaaagcctgctctgaagtagtagacgttttagatttcacaagaactttatcaccttcgcaataagtcgaaatcaaagaaccatcggccttatccataacgtattggattttagaaagatctaagttcatcgtcaatggattttcgttcagattaaagaacttttccatagggcgagaggcaatgcggacagggccgttgtcatccatctcgaacataatgccacgggcttccagggcgtcgtctaagagccaatcactgtatgaggcatagtgataactaaatatgcggaacttagtcccgtagcgtcctgtaacatctttataaaagaacttagaggcttcagtcttatcacagaccgccatgagattatcgtataattcgatcatttctttatcctgtgttgggtgttccaaggtggattgaactttttgatgaacataggttcctcaagatccatagtcgaaatcgacatctcaccaagttcattgttaatgagtaggttgaaacattgccgtgcatagaattcaaccttcttaccggatattaacgcgtcaaaaattttagcagatttgacagaatctgagttcgtgtctcgtctgttaatcgatgtccggtagtaattgatacgtttgcgaagattcttagttttacctatgtagactagttcatcatcgactgctatggcgtatactacattaaatttgtttggtacctccagctgctttatagtacagtctgattcatctagttctagactaacatacttaatgaagctaaattcatctgcgatttctttcatataacaaaggggccgaagcccctatccttataaagatttgcgaattctggccagtacttcagaatccacatcgttatcgatttgggctacaagataagaagagatttctacttcttgtggggcagattgtactgtatcactatttaagtattcgcgaatccatggaataggatggtgagtactttcaagaacaatagagcacggcagcccgacagccttcatacgagaaacagtaagataatcaataaacttatgtaagatctcaacattaagccctggaagaccgccatctcggaaaagatggatggcccagtctttttcctgctggttaacttccatgaagatacgaacagcttcttcttcacattcttttgctacttggacccattcgtcaccatcagtaccaagttgccattgacgaatctggtactgggttcctttcaggtgaagctgttcatcacgggcgatgaacttcataatcttagcattgccttccatgatttccatgttcttatggaaattaaatgtaccgttatgttcgattgagctcgctaattctcaacccgttctcttatgaactgctgcatattactatgcagaccagactatatcacaatcccggagggattctccccatttcgagtcgcttgaccctacgtccgaagactagtcgttgaaccttgttttgcaattgttgccgtgccatcgtttatatgttgatggtgataaatctttcttatcacagtatggacaattcaattgaattctatttggatttaatttacatctgtcattatgttttagataaaatccaggacctttaccaatgtgaccacagaaatcacatgtgatttctttttgtgcaggatgggtcccgttcttaaccatttctaatgtttttgctgatgttcttttcttatggtcttctgataagaaatgatgtgaaccgtcatttacccgttttgattgggtttctgactgcattttaccaccgcaaaatacatgggtaccttcttttatagctgcaatattgcgttctttaacttttgcaatatgctcagcttgttgaaaattatgtatacctaatgcaactctatttaaattagatttacgctgtatttcaccatctaaaagatgaaatgtaccattttctatcttagatttaatagaggcaatatttttagctcgtacttcagggatattaaaaatctgaatttctctagattttgcggctttagaagctaattcagaaatttcttcaggggaatatttcattctaagctttatagcatgacaagcctggtaatctttttgagctaaatgtatatcataatgttcctgtatagaaaggcacatcaaattatctaaatcattattttcacggttaccgtctttatgatggatttcgtatgttcttccatcagaatctttaggtataggtccgttagcatctatccaaatttttctatagttcaattgtgcatcctcttaaaagcataatcattttttatattatactaattaaaggtgcaagcaaaaccttggctgctagttttccataaaggactttccagcaattaaaggagttttcgataaacgttaccgtttaaaggcgcattttacgcaaaagatacataaaaacgaatagcttcaagagcgttcactacatgcatgcaaagatacattgctttcatcagatcgtgtttagcttgtttgacctcgatgttgtctggattaaagcaacgttcttgagcattctggtaccgacgatgggcttcagtaaccgcatcatagtaaacaccgattgattcagcccgtttcatgatggctttgtcgagaacaatttcgtcgaagactttagccggatcagtgaataagttacgcataatatgcgtataagaacgagagtgaattgtttcactgaatgtccaggtctggaaccaagtatcaaggctcggatcagaaatcagcggagcaaatactgctgaaggtgcacggccttgaattgaatcgagaagactttgatacttcaggttatctgtaaacaggttctgttggtgctctggcagcttttcaaattgtccgcggtccatcattaagttgacttcttctggacgccaaaagaatgacagctgcttttcaataaggtcttcaaaaactttatgacgttgttggtcataacgtgcaatgcctagtcctgaaccaaggaacatcggttcggtcatgatatctacttgtttggtattaaaaactgttgtcatttagaatccttgaatttgcatttatcataatgccaacgaagagcattaccttgttaactttttaccacagagagggcccggcgggtactcagcagacgatgaagagaggctttacgcctctccactaagttatcatatattttttgataattcatgcaagtactatactacaacttacaggacgaacattcttctgctgaaggctgttcaatttcataatcatctgtaccggacccatcacgagtattatggtaataagcagtcttaccgccaagagaccaaaaatacaacatatcacgaatcatcacagacataggaaccttgcctttagggaacactgccgggtcgtaactaaagttggtagaaatactttgacaaacaaacttctgcataatagccgcttgtgtcaagtaacctctcataccacgtttggtcatacgccacaggtaatcatacaaatcgatgttgtgttcgatattcggcacgacctggttaaatgaaccttctttagattctttaacacttaccggcccgcgaggaggctcaataccgttggtagaattagatacctggctagatgattcgcatggcattagtgcagaaagggtgctgttacgaataccgtacttaaccaagtcttcccgcaacgacgcccagtcacaaacatagttcggcgccacaacggtgtcaacgcgtttgttgtaccagtcaatcggcagttcgccgcgggaccagcgagtttcttcgaaataatcgcagcgacctttttctttggccagtttaactgatgctgtaataagtccgaattgaagccgttcaaatagttcatgggttaaatcattagcatcatcataagtagcaaagttagaagcaaggaacccagcgtagttcgttacaccaatacctaatgcacgacgctttttagctttcagagcctgatgaacaggataactctggtaatctaagagattgtcaagtgcacgaaccatgatttcagctagagtattcacttcatcctggtcttgataatcaaagttatctaatacaaatgctgccagggtacagagagctacttccggatcatcgccgccaacgtccttagtaggcaatgcaatttcacagcaaagattgctctgcttaacaggagcaatctcaggaataaacgggccatgtttattaacgttatcgttaaagaatggatagatccttgctgtacctgcacgttcggtaaagaacagttcccatagttcaagagccttgatgcgtttcttacgaaccgctgggttcttttctaatgactcgtacagttgtttgaatttttctgggtcgccgaagtaagaagtgtacagttcgccatttgcaacatccgggctgaacaaagtaatgtaatcatcattcagaaggcgttcaatcatcaggtcaccgatctgaaggccgtagtccatatgacgaatgcggttctcatcgatacctttattgttcttcagaacaagtaggttttcaacttctaagtgccacatcggataatacatcgttgctgcaccgcctcgaacaccgccctgagaacatgatttcactgcagtctggaagtgtttccagaacggaataacaccggtgtgttttacttcacctgcgccgatcttagaaccttcagcacgaatcataccgccattgatgccaataccagcgcgtttagaaatatacttgatgattgagttcgctgcttcattaatgctatctaaagaatcgcctgcttcaataaccacgcaagaactaaactgtcgtgtcggagtacgaacaccggccataatcggagtaggcaaagaaatctgacgcttacttactgcatggtagaaacgaacaacgtgcagcaaacgatctgtaggttcatcttggtgcagacacataccgatcagcataaaggcaaactgtggggtttcatagattacacctgtactacggttcttaacgagatatttctctttaagctgcatagtccctgcataagtcagttcgaaatctcggttgtggtcgataatggtgtcaagataaccgatctcttctgctgagtacttagacaagatttccgcgtcatatagaccttcgttaacaacacgagtgatatgatcaatgaacgcgggaggctcgaactgaccgtatacgtctttgcggagcgcaaacatagccaaattagaagcaacatactgatagtccggttcattaatagagatactgttcgcagcaactttaacacaggcgatttggatatcgcgagtactcatgttgtcaacaatataaggcttaatgcggtcgtacaattcgtacgggtctactgaggtattagctgtagcccaagtaagcacttggataattttatttggagtgaaaacttggctgcagccactggattttactacgttcatagatcctctatagtgaattcatctttgaataatttgttaaccacctgagcaattatatcaccatgacatggcttaggtttacatgtgcatcctagacgcattccacgtaaagtctcaagatgttcctttttgattactccggttctgagtttattataaaactctttcttaaatgcaagaatggcagcctcacgactgccagcattcttacctacctcgttcccccatagtgtacctcgatgaatgtttacatcgaagtcggagtggtatttattcactacacgacagatcttcatgtgatatcaacttcgaaccaacaaattaattcacttttaccggaggtccactcgtatgatttagtaatagacaaaaccctttgttctattttatcaaaaaccacagtatcgttaatctcaggcaactcaataggagacgtatcaaatatttctcctaatatagttttagattggtgtctattgcggacaaatcggatattcattcacaggcccttaatgcagcttctagaacttcgattaaagaacgagcatggtctttatcaatttcaaaaccaagcccaggagtattcatcttaagacgaattctgttacagtagttaggataaaccactgcttggattttctcccagtggttatctgtaacgaattctatcttaacctggtgaagcttatcaccagtgttagtgtcttttcgtttgatcataccgccatcttagctgtgatagctgggtgacttttgtacccttgaagtttgaagtctttatgagacatagatgtagtgacccagtccaattgagtttctgtaggccagttttcaaaattactaggccaggtaatttctaagttacaaagttctttaggttcacgtctcagaacttcttcacactgttccatatggttcatatagatgtgcgtattgccgcctgagaacacgaggtcgcctggaataagattacacatcttagcgacaatatgcacaagagcggcgtacgacgcaatattaaacggcaaacctaagaacacgtcaacagaacgttgataccactgtaagtcaaggtacccgttacgaacgttgaattggtaaaaacagtggcatggtggaagcgccatcttatcgatttcagccgggttccatgcagaaacaatctgacgtcggtcagtaggcatctgtttaatacgattaatgactaatttcaactggtcaataccaccaaaatcacgccattgcttaccataaactgggcctaaagcaccatccatataacctagttgacgggcttgggtctcatagttctcgtcccaaatagttttgccttggtctcgagagccgtgagtacgttcacgaagatcgtcaacattagtagagcctgacaagaaccaaagcagctcagagatacaggctttccaggccagttttttagttgttactgccgggaacccgcgtgttaaatcaaatcgaatcttcgtgccgaagacggcgcgtgttccagttccggtacggtcatcagtgtcatagccatcagtaagaatgtgtttaattagatcttggtattgtttcattagtccatccaggaataagaagattcataacgaggatattttggcttgtatcctaacttaatcatttgttttgcttttttagtgaaccccagagaacgctcacctttattatgctggcgaggagtcatcggcccttgatgcatctgccgacaaataaaaagtgccattgcactaggtacatctttaactttaagtttattgctcattattttactctgcgcaaggtttaaaattaatttctgagccctgtttaacgaaccgtccggtaatagagaacttagacccattatactgcagaattccattagcaattaataccagtgtgaatctggtattcataagaacagaaataactacaccaggcgccagcctgacacgaataccttcatcacggctccaaatagcattagggtccagttcgaactcaagctgataaagaccgtgctcgattgtattatatttgccagggttacgtttatattgctctatagtaggggcattaccatcaataaccaaggcccagttcttttggaccttatcagcttcaagtaaagtcagtttcatatgatttctcgtgttcaggagaaaaatacagcttagagccatgtttaacaaatctaccgtagatagatgcttcgccgtttttaacttcaatgtttttaagctcgactgctttaagccactgctcaattttgtaagttagggtaaacgacgggacccctttgatttgccgaacagttgtttctgttccgtatgcagaagaaagctcttcaataggaactttaagtttgtagatgccatgcttcatattaaagcgttgccactttttctgaataacatcttctttaactagaaaaattttagccacggaattcgccgtatacagattctgtaatttgagtcaactcatcgcattggtaccaatgagattctttaagcatacgagtcattggaagggtattcaagaactcttgagtcatctgaacagttgagttcacacgatgcttcttaataatgctagtatgtacaaccagatcagcgtgagggactgcctgctcaattaaacctttaccgccaataatacttacatcgtatgtgttccggtccactatagtgtcccagggataatctgaggtggccgtagaagtaacaataatctcgccttctaagaaggaaataaactcatccggatacataatttcatcgggcgaagtaccatttttagttttaggtttaccacggcctggagtaataactactaccgaacgacggcctggtaaaggagcatttagagattcccaggttttagcgcccataatcagtacagtatttttagtacgattacggaagttaatcatatcctgacggatatgaccccaaggcaacccatcatctaacccaaaagcaatttcagtattgccgtctacagttttggttgcgcacgtagcgaatacgacctgtaacattagccctgcctcattccacatttaaaacaacggccgcctaattgccatagaccgccaccacaatacttacactcccaatcagttaaaatccacatgacttgtacccactagctttaatcatactctgaagagttttgaacccttcttttatggcttctgaaatttcctcaaatacttcccttttcagaatatacaacgaacctgcttgttcgccagaaatagctgaaacaacaacttggtcattaattaaaaattcgccgtacgctgaatcaattttacctgaaacctggttgcatcgcgaatgagggtcaaatacgagctcaatatgagttactccaggaatttcatcaaactggcaacgaatgttaacacgcggatatccaattacactaaatttaggcatataaaaataatcctaacataatgccactaataaaagcagcagtaacataaattaacaaaactgctaattcagcctcaatcatttcttagccttagcaagtttcattttattctccttgttggtgtaggaacatagtaacatgaacctacacctctgtaaacactaattttcgatggtgctcaaatagtacagtgtatcttccttacccatacccatacagtactcattttctatgaagtttgcgacgtcggcagctgatcctgaaattgtgacttccaaacacccaggctgattagtaattttgtcgatagcaatgttgtcgataactacgttgaacgattcgactatctctttcaggtattcaacatctaatacatcgatggttactttagccatgtttagctcccagtttgtttgtgtgtgagtactatactacacattaaaaccaatgtaaacccttaatgtaacttttacttttcataggcccaggatgcaaaaagggagaccgaagtctcccaatcattattacagaccagctaacagatcgtccagatcaccgtcatcatcagaagacgaagtgttcagtggagcagattgctgtttaggtttagagtcaaaagccgccatatcggcatcaaaagcatcaagatcgtcactgagcttatcagcttgtgctgctgcggtaccagcaaccagagcagtacccatgatttgtacgaatttagcgcggtttacatcgtaagacttaaatttgtctttggctacgatgtcattcagctgaaccataccttcatcaagctctttctggtaggcttcatcattgatgttaggaatttcagactgagcgccaaacttacagtcgtcgtagttagtgaaaccaccgactttcttaactttcaggctgaagttcttaccttcaaacgggcaagtcacatcaaccggaacttcaccaagatcagtatcaacttcgatctcagcgttgattttgtccatgattttctggccgaaacggtatttgaataccttaccttcgttttctggagcagccggatctttcagaaccagaatattagcccaataagaagatttgcgtttcagcagtttatattcttctgggttggtgttatacgaatcgttagagcttaagtgttgacagaccgggcaagaatcataatcaccgtaggtagaagtacagttttcgatgtaccatttaccatttttcttgaagccgtggttaatcagtttgacgaacggaagtccttcgtcacctttaccaggaaggaagcgaattactgcagagccgttaccggtattatcggtcttcagtttccattcacctttatcatcggaagagaaagaagaaccgcctttcagagaggccagttgagcttgaagttctgcaggatttttacgtttgaacatttaatatacctttttaatttaacagttatttacggttggtgatgcaacatgagtccttgcacctggacaagatttacattatatcttacatttatttatagcatcaataaagagctttttagcatctttaccatcgacttcaagcaattttctataagctttgagcttagtagaatatgtttcccaaactaagttgttagtagcttggtcatgcttgtcaatgatgttgagaaatgaatcaagcataataaacgtctcgaatgaaataacattcgactgaaggagcttaaagatatagctcgtttgtaccttttcattatattcaaagatttctgaaagcgcattcacttcaactttcttagcgaaatagtaaatgttcttcacatcatcttcgaatgtatttttaatcatcttcaacttaccgatatactcacggtaaaagacaagggcgtcagcatcactgatgtcgccgatccaggcatcttggttagcaaccaagttactcatgaaaattaatgtaagctctttaagagtgtgtttctctgcgagcttttcaaagaaatacttgtcgcgtcgtttttgataagctttatcagacacccgcataacccagttgtacttgataacatcatatcgaccagcgaagtgatttttaagcattaagtacaataaataaacacttttaccgttaacataacgagcgttatttggaggcatgcggagacgaatcataataagaaatccagcgtatttgttttctgtgttttactcatagatggtcgaagcatatattcgttaactgcttcagccttaattttttcaattattgtagaagggataaatctgttgaaatttccttctggaatactgttttcttctaaccactgcgaagtagcctgtagataacctagttcaccttcggcaactatggcttcaatagcgaagccatttgcttgtttatcaagaagtgaacttaaatcatcgatcttttcttcaccgttattaatcaaagagcctgtcataggtttctaccacttcatctttttctgttgcaaaacgttcacgggtgcctttatgatatatggtcagaagctggttaaacaattttgcctcaacgccaatagcttttgcttcagcccggttgcttgcaacttcgtccatataaccttcggcctttagtttagcgtcactagcagctttaattagattttttaaagtttcgccgtgttgggcttcatcaaattcaactttttcttttttctgtttagccattatattcaccttaataaaattcggcaatgttattggttaacttagacagaccattcttaacaaagtaagtatagatcttacctttagccgggattacgtagttattataccgttccatgattgaagcaacaatatcatcacgaatgaaatccatatcgattaagatctggttttctttaaaacgttcatactgctcggcagtaagaagttcttgtaatttaaccgggtcataataattcattgcgatctgttcaatttcagacgctttagttggaggagtacgttcaccttcaaccatagtaagccagtagttaccgcgaactttaatagaagcaacgttatctttacggtcgcctttaacaactttagttacacagtcaagtaacgcgtcaccggatttagttttaacatattttttctgcatcggagaccactgcttcacatttgggtatttgtgaagttgtgtaaagtcgccatcagacgaaacgatctggactgggacaccttgggtggctaaaaactttgttaatacagcgatatggtcgtcagcttccaccttatcaatattcataacaatataaggcatatagttctcaagttcttcgatgattttatgcatcgacgtgaataaaccttcccaatcgaatggagattcttcacggtctttagaacggtttttcttataataatgacttgcgtcacggcgccagtagcctgatttagaattatctacacagataatctgacgtgtgtacccttcttttttaaactgcttgatgtttttacgcatactgtttaaaacaagatgtcgtaacatcgcttcagaaattttagggaaccctgctttttcaccgaactcggtgaaggctgccgccataataatttggctgaagtcaataagagttacaccttctttcttttcttcttcaccgaacataaaatttagagacattgaataacctattcagtagtaatggacagattcattataaatactcctataataaagcatatttctaataccataaggaataaaaatgagcgacttaatcaaacagcattttagagcaaccaacgggcttgatgctggtggaaacaaagtaatcaacgtcgctaaagccgatcgtactgtgatgagcgatggggtcaacgttgagtatcttatccaagaaaataccatccagccttgggccaatgatcgtgggtatcctgaaggttttgcggttaccatggaaaaacgtatctgggtggcacgtgcagatatcccagccccgatcccaccagcagtaaatacctttagacaaggtgattggatctccatgcgtgtagacccgaagtgggaacagtatagttcaggaaccacagaacttttaccagggacttatgcaaacatcgatacccgagttaatccggttacactagttcttcctaaaaataaagtagaacaaggtgatacgattgttatccgggacatcggtggtaaaccaggtatcaaccaggcattaattaaagtacaagactctgcgccggcaatgatcttccaaggaagtatccttcgtgaactgcagctgactcgtccttatagtatgcttctgatgacgtttacatcggccgggtggtatgtaactctttcagatctgagttctttggcccgtactattaattctaccacactagatgccgctactgatgtgggtgctcaggtacaaagttcagagtacattgtactttattacacttctaataaaaaattaacggttcgtcttccgcggtacgctaaccatggagatatgattacctttgccgaaccggaaggcaaaacaccattataccattttactattaagacttatgatgcaaatagttctattggaacagaaggggccacgtcttggacctctaagattaaaggtggtggtgttctgatttacgacggccctcgtaatgtgtggcgcatcaactctatagacatgcagcaacgtgtaaaaatcgttactgatgatgtagtgatgcaacctaacgaggctattgctatatttggtgctaataactcgactgttaaaactattactgttactttgcctactttagttgctcctggcgatactgttagaattggcatgaactatatgcgcaaaggacaaacagtcaacattgttactcctcctgctccggctggtggtactaaagataggattgcatccacagttggcttacttcagttccctaaacgctctgagtatccgcctggggccgcgtggactcaagttgatagtttatcattcaatggaacttcggactatcctccagtcctagagttggcctacgttgaagctactcctaataactactggatcgtttctgaaaatatccctaccgtagagagggttgattctaccaacgatacgactaaagctcgtgtaggtgttattgcgttagcaactaccgcgcaggctcaagcaaccagtgggcataatgatgacagagctattactccgttaactttgtcccagcgtactgctactgagtctcgtaccggtattgctgaaattgctactcaggctgaagctaattcaacaacagatgatactcgcattattacggctaaaaaattgaacgatcgtttagctacagaaactatgcgcggtgttgctgaaattgctacccaagctgaaacgaatggctctactgtagatgataagatcgttacccctaaaaagcttaatgcgcgtaaagctactgctacgctagacggaattatccagctggttaatacaggcggcacaccgggaacaagccgatcagatcctggtacttctaatggtactggcgtatacgaccacactgatttctctaaggcggtaactcctaaaactttacgtgaatataaagctacggaacttgcctccggatgcgtatggcttgctactgaagcagaagttcgtaatggtactccggcgtctaataatattccgaccgttgttacgccggaagcattacatgctaaaacttctactacaaaagatattggtttaatccgtatcgctactcaagatgaagctaatgcaatgtctaatgctgtgagtaatgcagctattactccggcaacattaaacggacggtcggcaagttatactcaaacaggtataacccgttatgctattcaggaagaatttgatggtgggactttagaaaacgttgcagtgaaccctagaaaaattaaagagtatttttctagaccagctcgtatgacaacaagatccgaagctgggttggcccaagccggaaacttgtgggacggatggacgcttaatatccaggttccaacagaaacgcagcgtggtactcctaagattgcaacgcaggcacttgttaacgccggtacagacgatgttgattatctgacgtctaaaaagcttcaagctaaaaaaggcactgaatccgcatatggtattgttaaatatgcaactcaggctgataccaatactggcactgctaacgatgtagccgtttctccggtccacttgaagtatgttattcagacttcagccgattggcgtgcacaagataacgttcgcggtacagtccgtgtggctaatggcgctgttgcttggaccggtaacagtactacaggttctgataatacgccaaaagaatctaacggatacgcagtatcacctaatgggcttaagcaggcattagctaactatcttcctttgaatgctaaagctgataactctgctttattgaacggtcttacatcagatcagtttattcgccgagatattaaccagactgtcaatggttctttaaccttgactaaagttactacttcttcagcgaatattgaaacatcggctatcctgaagtcttctaaagtagaaactacgggtgatattagaatttctaatgctacggctagattgcttttaacttctgatactaatgcttggtctgttcaagcggcagctaactccggacgtatagcctttattagtgaaaatgatacacaaaacgttcatttatctgtttacaacgattcccgtggtgtaacggctaatgttaagtttgaagctcctgttattaatgccactactcaggtccagttagctggtacaggagttattgctttagctggtacgaactcgatcaggttagctacttcaggtaaaggtcttgagcttgcttctaatgatgccggtaatatcatagcggctgaaggtagtacaacttacaaggttctcactactaagaacaaagattctattcttgattcacggtacgttaagtcggctggtgatacaatgactggcaacttaactatgaacggttctgctcttgttattaatgggtctgaaggttggtacgatcactctactacggcaaactctgaaaaatacgcaagagccggttcttggacagtagaaatcaaaaatgccgctaagttagccacacttcctggttatgttgttccaatcagagaagagaacccgctagttccaggttctatgatcgtaactgggtatgaagaaaaaactgccgccggcggtcttttagcccagataagcgtttcttctgattatacttatcagacttggacaccatatccacctaatgctgagcaggcggctaaagcaagagctcacaccatgtggaccagggtatataacccgtatattaagaagtttgatagttggatgcgtgtatttactagcgctactcctcctacagctgcagatatcggtgcgccgagctcagtaagtacttctgttaaaaccttagaagttcaagaatggattaagattggccctgtcaagatttatcctgatcgtacttctcagaccgttaagtttgaatgggtaggtgattaatgagtaatttaatggctgcatttggtgaagattttgtcgagactaacatcttgtcagaatctaaccaagtgagatattggatagaacttatagccacacatgctaatgctgttcctaatacgcatgtgctcaaaattaatcaagttgatactggaggtgccccaggacggggcatcaacatctggcagattaatacttcttttgctgatagtactcctaaaactattgatttaacaaacggtgaatctgcggctaacgccgcattcgtcgagtacatgaatagtaaaacatcaggtctatatgcaataatgactaatcagagatgtttaacttctccttctgtcaccgcctggttcaaatcaaagaaatcagttgtttggcctgaacaacattatactgaattatatcctaatagcgcctattgcgcgctatttgctgcaggcaaaggattaattttgtatgaagctttcaccggaaatgacggaatcgttaaagaagattctagagcaaaactcgcagcagtttacgataatgtaggcaccgtaggaatgtgcggtatccctcaaagggcctacgaaaataacgagacatttcgtgatactacagggtatgaatacaaacggtatcctcagcaagatgtggttatttctaaactatctgattacggtcttcagcaaaacttgtgggttagatttactgcagatctttttgcttcacaggctttaatatctgctaattgcaccacaaggatgtctgtaagatggttcaacggaacaactatgttagattcgtttacaatggaagttcctgcggcttctgctgataaatgggttcgttttgaaaaggacctaagaatcccatccggcgcagatggtttcactgctgtagtttctaggtaccctagaacatcagttgttgctgaaagtgccgttcaaaatgtcatgatggttcaaattgtagaaccagctcctgaacaatcggccactcaagctgaatttggtgttaacggtattcgaatgaataaagctacagagggttctttaactcctgcggctgttatgtttgaattgcctaatactaaagttgatagtagtggtaatcgtactgctaaagaattcagggaactacaataaggagccttcgggctccttttttcgtataaatacgttcatattataaggggacgaaaatggctgatttaaaagcaggttctacagtcggaggtttaccaatttggcatcaaggtactatgccattggtcccagttggaaactctttgacttatcgtggttatacggtttacacgactaatgataaacctaaagcagcagataacgattttgtatctaaagctaacggtggcacaggttctcaaggtttccaaaaagaagttgaatttaaagctggtgttaagatttccgcaacgttttctggtggttcaaacctaaatgggttgtattctggtaacggagatggagataccagagaaaaagctaacatggacctgcgttcatggtacggtatcggtatttggaactcatgtacaaatgatggggtccagggacgcacaatctggtttagtgctaggcggggtactatcggaacagttggtgatatcgtttcaggtagtcaagttattgctaatgcttcggcgccaacagccgctcaacatttaacccgtaaagactatgttgatgggcgaataaatagtgttagtaatatagctaacgctgcggttaagaaagccggtgatactatgactggtgtacttagagctgaagccggcgtagttatagtaaataaagcgacatccggtgaatatgctcctagattagatcaggttatttcacgcggggtaacaatagattttggcacatactaagaggtagccatggccgatcagaacttaaaacaaatacaatttaaaagaactagcacagagaataaagcaccaggtgcagatatcgtagcccgtggcgaaattgtgttaaacactcatggacgcactctagctatctacactaaagacgaagctgataaagttgttcagcttgctggtaaaggtgttccatttttagatacttccggtactctcaatgttgatggaactactacattaaaagataacgttactgttgctccgaataaatcgatcagttttgaaactactgatttgagcggtgaaataactcgacatatcgtaggcaaatgcgccactaatgatggctggtacatcggtgcaggtggtacaagcaacagtggtattcttgaaatcggtactattgacgatggcgttgaaaccatccagtttgtacaacgcggtgcgggcaacgttgaagcccgaaaactggtcttacttgatggttcgggtaatactactcttccgggcgatttaagactgggaactaataagactgttaaaattaacagtggaagcaaccttgttcttgaaatgggtgtaggctctaacgacgtctatattaaaaaccagcgaggcgtaggtgttcttcaattaactaatgatagcaatctgaccttcagaaattaccaggtttattatgctatgggcggaaaaggtcctggtaaaggcggtactcttctgactaatgtagaaaacaaccgccaggcctggcagtatactatttctgcttcaactgccacaaccccgcgctgggttaaaatagccactataaaacaccctggaatgggctcggcccagttggatttaatgatagctggtggcattgattctgggcatggaagacattgtgtagattttatcacattatcaggtcgtaatttaacatcttggagccctaatagcttagataactgggttgaatggcgtagaataggatcaccttcctctggaaacgttcctgcgtattatgtcgataaaaatgattctgctactaatgcagaggcttcatttgatttgtatgctaaggtccctcgttatgctaacgacctttttgtaacagtattgaatacctccggatacatcggccaagaatctggaactgtagttatctacgaaagcgggcaagatactggtgacacagggccttccggaagcattcctgtttcaatgaagcaaatttttgacagcttatcaaaaccagatttcaacgataccactggcattcttcctattaaccgtggtggtactggcggtacttctgctgcggccgcgcgtaataacttaggccttggaactgcagctattcgcgatgtcggtgaaggcactggtaaccttttagaaaatggcgcttatggcttaggtggtaatggcggtaaatcaatcgaaaacattacctctaatgtggatatgatgacccgtttaaaagcatacggcggtactttctggcgtggtgctattaaatctggggttagtgttcaaaatggtctttatagccacggctctggtatttttatgaatgccggggatacgatgtcggctattaatatcgactacgccagtgctagagttcgtgtatacgcaattaacaacacaggtcttgccgcaggaaatgttaacttcaacgaactttatggtacagcaaacaaaccgtctaaggccgacgtagggcttggtaatctgacaaacgacacccaggttaaaaaagccggcgacaccatgaccggtgatttgacggttcctaatttacatgcttctgggccgggaaccgcatcagtatatgttaatgccgggactgggaatgcacatgtatggtttagaaccggtggtaatgaacgcggtgtaatctgggcaaatccaaatactgctgacttaggtcagattaatattcgtgcaaaaactactggtggtacttctgctggtgattatagtttccgttctgatggtcgccttgatgttcctgtagcagttaaagttggtggagcagcaatgctaaccaaagacgggaacatcacctccggttcaatgtttggtggtaaccttaacaactatttgacttctattaaaaacgacatcactgctggcgataataagcaagtaagtaaagctggtgacacaatgaccggtaacttgactattaacgctaacttaaaagtcgaaaaccctaatggaacgatggttgatttaggttcagagaactctgataagtacagcagaataactcttgcacgcaaagttggtgatggcgcagctgtagcaatgcttaaagttactcctgaaggacacgtgcaatttggctatcaagatgcagttgctactccagctcctaccaagtacatcctggttaaatctaacggccttgaggtagaaggtgatttggtttttaatcagacctatcgcggcaccgaagaggcagttgatattactgataagactgttgaccttaatggtcttgtcattaaaggaaccgacccaggtactcgtcagatgtataaatgcttctcatctggtggtgcttctaagataacgaataaacctacctctgacggcaactttgttcttgaagttctgtctttgcgtaaaatttctgataccgattggtcatgtaagcagacctttactacaaagaacggtggtgttgaaggtacatatgttcgatactgccaaaacggcacatggtctgcatggaaagaggttgttgctggtgttcaaccgattaatttaggtggtactggagcaacttctgtagctgctgcccgtaataacctcggtattggtgaaggacaaacggcaacatttggtggattgaatgtcaacggcattggaaccaacgacccctatatcacatttaaaaatggcgcaagaatacgagaaggacaaggcaatggtattggagctttgattttatcagcttcttcatcaactgactcaaaataccttgcattacgcccttatggtgatacctctggtgttgatattaaagtaaaagccaacggctctagtgaagcattgcttgaatggtcttatggcccaggtattcgttcgaattcatcgggtgcttttgttatctactcaaaagccggccaagcacttcatttaaggccaaatggtgacagtgcgagccaagctactgttattgatcagaacggtaaaatgactatcggtggtgagttcgaggcccagaactcgaaaatcacaggcaacttgaacgtctctgaagataacagaatgatcgttcttggcaaaaactctgatattggtttagtcaagaaaaacggtatgccgggtaaaatagccatcagtaaatctaactcgtttactgttatggcatcaaccaataccaataaccaaattaatcctgctgatacgtttaacgacatattcaaggtagatgcagacggaaaccaaacagtctatggaaattcaacaatttctagggctttgacagtatcaagcgttattaatgctaacggcggtattattgttcctactaccaagtatgtacaaattgccgatgctcctacacagaatgaccaagccaccaacaagaaatatgttgatgataaggttgcttctgctattagtaatgccggcgatacctatcttccgttagcgggtggtactgtaactgggcggttaacaattgcaggcgatcagttaaaaactacatcactttgggtcactggcgatgctgctgttaacggtgttttaactgttgatggaagggctagatttaatcaagagttcattgtatcaacttcggttaacgtccagaacactggtaacactcatttagtcttccgtaaagcagatggtacggaaaaagggcttgtttgggccgatgagcctggtagcgttagtataagagctggtggtatctcagggaagacgtggaatttctggaacagtggttcttgccaattcccaggagctatttctaactataatggaattagcagcactactaattatcctgcaggacagcctaacggtacgtatagtaataccgcaggattggtaactagatttagtaatggtgcttatgcttcgctgtatttccaagagtatgtaggaaattatcaccaggctattcttaatgttaatggattcggtcgagatgacaatttctatttcagggctggcggcgacttcttctgtactcgtaacggttcttttgataacgttgagattcgctctgaccgtagagccaaatctgatattaaagttattgaaaacgctttggaaaaagtcgagaccttaagcggtaatacgtatgagcttcataatacttctggtggtactactcgttctgccgggttaattgctcaagaggttcaagaagttcttcctgaagcagttactcaggataataaagaagatggcggtatgcttcgtctgaattataactcagtaattgctcttcttgttgaatcagtgaaagaactttcggctgaggtcaaaggtcttaaagcagaaattgaagaacttaaatctaaataatgatatggggccgaagccccatctttgaggagatatcatggcagtaacaggaccgtgggttggcagctcagctaaggcagaaaccggcgaagcgtggatggcccaggcaggtgctaaattaagaataggaacaccgttttggatgtccaatatgatagggaaaagcgtgttccatttaatattcagaattaactatgcccaaggctcttctggagacccatctaggtatagaggattctttaaacggggattagctgctaagattggagattctgctaaccaaccgacgctgaatgcgttcccgggcggagaagtgggttcactagtagctattacaaatatcaaaggcgacccttattgtctttctatttggaacggccaagataggcgagttaaagtttctatttttagaagcgatggagccgaacaatacgatgtttatttcagtggaactactatggctgacgggtggagaaggtataaatgcgaaaacgccggcgggctgaacagttattttgaagccagaatgaataatgaattcggagctttattagaatacgtttgataaatataagtgaggagggcacgtggccaataaaatatctatacctataacggatattctatttggggtgctcgaccgcttgtttaaagataatgcctctggaaagcttttgttttccagagttatagtggttgtaatcttatttgggcttacttttatttggtataaatccgatgatatagctaacgcatacgtaaagagttcgtatgaaagttataacgagattctagtaaaaactcaagagcttaaatttgagaacacagcgctcgagcaacttcaaatagttcatgtatctagtggtgctgattttagtgcagtatttaatttcaggccaaagaacttaaactattttgtagatttaatagcttttgaaggaaaattaccaagcacagtagatcctaaaaacctaggcggttatcctatagataaaactacacctgaatatactacacacttgtccggaagaaactactggagtgagaatgaatttgttttcttaccaactaagaagaagcctgaagaagtgacttatatgttttcttgtccgtattttaacttggataacatttattctggggctgttgagatgtattggtatggcaaacgaccgtctatatcagaagatcgtttgacatcaatatgtgggcaggccgtaagagctttagggcggagtaagtgattaattgttagcgtacatttccatatggcggtatacgctttcatgacctacattaaattcttgaatcagctgtttcttttcttcatcagataactcggctatcatcttacggaagttagccgagtttaattcccttccgaattcatttctaatcccgcattcgtttaaaaatgcaataaacccttcacgattttctaaaatatcttcacgttgaaatttaatcagtaatgaagccatagtaataatttcagaaactatttcaaacttagacatattattccttaacagacatctcacttgttttggtatacgagtactataccttgttacactaccattgtaaacccgtgtttttggcttatctttttgactcgattcagagcgtcaaaaactacactacgagaagggccatgtaatgtatacgtctgatgagcctgggttagcctgacgcagcctggttcactattgaattgggccttaagtgcatgattaagcttgaatttaggttcagcttcgttgctcctgtagaacttgatatctacacggaattcttctacgatactcgacatcaagtattcgaacagatcataggcttcacgttcacgttcaagttgttcatgagctacattcattatctttacctttatgcttttgtttacgcttggaatctttaacagcgcgctttttgtctttatgggcgccgcccttgttaaagtcgttcttcgctaccaagttattcattaataaaggtcctctgagtataattcatcagccgggccaccacgctcaatacgcacctgattagcatatgtggcaataatcatagcttctttgcgggtccaatagttgctgtattgatcgatgaagccttggtcatcgccaacggcttggtctgaaactaatttatcagaaaccacatccagcacagctgccatacatttagaataatggcgtgcaccaggaataactaaagttccgccatctttcaatttgaagcgattagctgctgaaacaattcgacgttggaacttgcggtcttcgtaccaatacgcagtttcccagcagatttcaggtacttcgtccagaacattttgctctgtatattcgccaccataagaggctaattttttagctagactctcgggggtttcgcgcgctaaggcttcgtctaacaatgctaagcgctctttaaatggaagcataatatttgataacctcttttaagcatctggttgaaatgtgaaaccgttttgcaaggccgcattcttggatgtgcatgctcagcgtatgtgcttcgacatacccaagctcagttataaaccgtttaatttgagccttttctgaacggtttagcgaattaaagtattcactagaggtcatcagtactctcatttatttgacctcgttagttagtttttcattaaggactctaatgacataacgaccgtggtctgcacctagtttacaatcagccattgtccaagagtcgccattttggtacttatgcaaggccctagtattaatatcttttaccaagcccataatcaaatcattaagttcttgttcactcatttaaagaatcctttaatcttctgccagatgcttttcttaggagcttcaccgatctggcgaataaccggttgagacatctgaagttctatgtaatctgcaatacgaatcttatcagcggcttcgacataagaagaaatggcagccatgaagttagttctgaagcctaacggggcttcatcatcaccgcgtaaaattgcgtactgccctgctttaaccttaacgatagtgcctaggtaagcaccgtggtaccatacatcccagccagcttgagttggctcagcacacttacgaagttcattgatgatttctaacttgttcatattaacctctcattactaaacggatgccaactactttgatttccaggtcttcacgataagttttatcatcgccgtatatttgtcctaaccgaactaaagcgtcctgctcggtttctgctggaatattatacgtattaggtgaaacattgtcgcctttataaaaagttacttcataaagatttttcatattttcctcaaaatacatttgcaacgattgaagccatttcagaagtaatatttggaaaatcgatgtaagtgtttttgccgcctactttgatcttaacatctgaacttaaagaagtaaatgctttagtctcagactcggtcatgttataaccaaagacacgaagtgagccatcacggcggatttcgatttggcgaacaccgttagtacgcttaaccaactgaacttctaagttgctgcggttttcgatgatacctttgagatcaacacgggcttctagaatagttttaacttcttcggccagcttagtcatttcttcagtaacaccacgagcactacgagttctacgtttctggagaagctctggcttattttcttcagcatggagaaccgccgcggcttggatgatatccattgcttcaccggtagcaatcagaccatcttcagatttttcgattaagcctttcttcagaagaacgccgatgttagagttcaccgaagaggcattcatcgtttcagacagaaggtcacgaatttctgcagaagtgatgtagttgttcttaacaacctggaccaggatagatgcagttttttcgttcagaacgtcgttagaagctttgatgatgtaagtaactttagacattttatttctccaattcaatcatttgttttgataggtctataataacacgtttgaagcagaagtaaacacttattttccaaaaacagttttacataaagccaagaaacaaggaaccatgatagctaaccagaagactaagaagatgatttggctggtttccattttatttccttcagtttgttggtgtaggagcactataacctgttttgaaagcaaagtaaactggttgatttaaaaaattttttgagttggcaggaattgcctagggagacttttaaaggaaggatgatgaaacataaagggtgcctgaacaaaatgcccaggcgcccacttagaaggtatagtctataatcagagtggttatcatcaaagaaaagaccattcctacgaacagcccgtgtagcgtaatcatctggtggccaaaacggcgccaatagctatcagaacgacaactagaatccagataacaactgcactaccgatccagaaggcaattccccataaagcagctgtagtccaaaccatgccacctgacaggttaattagaaaagctactaaaccgataataaaagctaagctaaatttcatttgatttcctcgaggtctttaagatattcagtttgaacatcagtctgtttccagtattcatgctcatcgcgcttagcacgagcttcttcagccagtttcttggcttcatcactagtaatatgatagatgttcatgcttacaagtttttcagcataatctgctagttcgtcgaattctttaacttcttcgaccagtttggcccttgtcttaccggcaatagtgatatcgccgtcaataaccttcttaatgaacttggctttagctaaggccagtttgaaagcttcttcggtttcgcggattttggagtcaatacgtttctggacaaaaaccttacgaacttctacaaaatcgcgaatcaaatcggcggcgcatttgtattctttcaacttgccgagatgatttataactgtgatgttctgagaacgacgttcgattagtttgaagtctttcatgattttttcatgacgttcttcttcggtttcacctaagttgtattccttgcggaatttaactttgaatccgaaaccatgcttgccgcagtcatcatcgtatgtaatgaaccctttatcttctaaagcatcgaggattttaacataagatgcacgatcatacttatacggaatctcagagatgtacatcactgtacgagatttcatttcgtatattccgtgaagttcaaatgcgccgtcgacaggaattatctttcctttaaactgtggaaagcttaccttcggctcagagatcttcttaccttcgagagcttggataacacttttcttaacagaagaaatgctatgaggcagaatatcagtagcataaccagtcgcaataccggaaataccattaagaagaacagtaggaataataggcagataataagcaaccgggacatgctcgtcatctttgtgggccggggcatactctgtatccttgtacagtttgtagaaattttctgaaatacgtgcaaagatataacgagacgcaccagcttcttgaaccagacgagagccaaagttaccttggccatctaagaacgggacattgttattccagtcgttagccatcagtgcgccggtttcttgtgcggaaccttcaccgtggtggtatccaaggtcagctacaccgcctgcaatagatgcgagcttatggaatttatttttatcactcttaccaagcatcaaggtacgagcaataacaaagcgttgaactggtttaaagccatcaatcatatttggaatcgcacggttctctacagtatacattgcatacgcgagagcttcgttattaattatactttccaagctacgaacattaaaagtatcgttagcttgttttgacatcatatcaaaaatatcagacatagtacctaccaaataaatgaaccgagatgcactataacatcagaaatgaaaagcacaatataaactacgccgtatatcataccatagtacattactaaagcaagaatagccatcacaaggatggctacgaaaattttcttaatcattgctagcacaagcctttaaaaagtcaattactgctgctaaaacgaaccaacagatcataaacccaacttgagctgatgtggggatccatgctccagcaaagaacatagtacacagaacgatacaaataatcatccagaagaaagtgtatatccgattcacttatgtaccccacacattttagaaattctttcgaaacaaataaagcctacagagaacaacaccagcgatataagtttgcttgtaacaggaagacctaaggcaacataggtcccggcgcaaatcatcaatgctaggactagcaagtagcccatagcaaagaacattttcataaaactactcattagtagctctgaagaacgaatttgaagttgtcattcagaatacgattcagttcagacagggtctgcatttcagaactgtgctgacgagtgaatgccaaggccagttgacctttcttgaagccggtggtcagaggtttcattttagactgcggcagatacaaaacttcgtaaacaacgttattgctagccatagtacgagccagctgactacgaccctggcgaatgtgagacaacgtagcattaaaaccttgggccgaacgctgattgcctacaaagaaccgcgctcctactgcacgattttcaccagcacctttaaccataaagtagaaacctggttgagccagaacttcaggcataacgaagccgacagtatgaccgtttttaacgtgagccacagttacagcaccagctttagtcagatcgccacgagtcatgtagttgcgggtatcaatagtcataacaatttcctcaataaagtttaagttttatcctctatgggagcctagctcccagatgttatggcttaaagaaccataacatagtatcagaccaaccgagccaatacggaatgttgcatccaataataaaagctgctgcatgaatccagcctaatactacattcatattaatttcctcagaacagatgtcttaaatttatgataatcacgtcgataaagaacactacaggcattatcatcagtacgatagctaaaacgataaagttgaaaatgttcttaagcatgatttcctccattttgtctgtaggaacatagtatcatgacctacagacgttgtaaacacttagaggtgaatttctttcacgattatttcaccacgagaaatctctagatccatctcagcataagtaagataacctgaacgcccggatagaactcgcaaggcatcttgctcagtgctcatcatgaagatttggtcatcatcgtagtctagataatgctctaccaagccttcaaacgttccggtgcaccaagtagttacccactcgtttcttacaatattgaacaatccaaaacgtttcatttagacatttcctcaatttggctgcgataaccatcacgaacttcacgcagagcttcaactccacacatcggagcaattccagatacagcagctgaattcaattgagcttctacatcaagaagttgatagtaaacatattcgcgttcagcagcgcagccgtattttgcttttccgaaacgttgatttaaagatttcattttagtactcctcattgttggtctaggagtactataacacggtctacctagtatgtaaaccttttaaagtgatattcttcttcagaacaagaacgaagataccagccaccattttcatacttactttcttgaaccagaccagagccaggcaagaaggcagtttggtcacccatcatacgaggagtaaacctgtagacgcctggggacacttcttctacatctaatatgattattaagtcagataatcgatacgtcaggaacccatctaggtcgattcctgagccgtgtggataaggatatcttcctttagtatggacgctaatccatcgagaatcagactggtgggtcttgacctcgatgcgcacgccttcttcagagataacatcgaaggagtaactgaatggattggctttgtcaaactcagaatccatcacgcgtccaaacgtgcattctgcaaccatctgttctgctaatgttgctataacgcagcgctttaaagtagaacgttgttcttgcgaagcatctaaggccattgagtggcgagcagtactaatggccttaattttattttctctactaaggtcttcaaccgttaaatcagtcggcttcagattcagcagttgtttccaagtcaagctcatcgataccatataaacctctgatatgtagttcaccataataaattcggtcgtcccattccagagtactggaatcgactaatggaaactcgttctcgacgacttcatcacattcaagccagccgtaatggacatcgccttcatgtttaacaagcttaccgcaataaaccgtagcggctttatggttcccacgaagatttgagatggtgattttacgatcgccggcattgaatggattaatcattagaacctctgaatgcgtttttctaggatgtgtcggtacgcagacattgtatcaagctgtctaagaagcaaattttggtctacagggtcaagcgatttgaatgcgccgctgatagtgaatgcagtcagagcattaattttcagattcagttcggataattcatcgataacacgagattggaagccagtcataagtcaccttataagaaaggggacaagtccccatttgattaaccacgtagttcgtcgttccaacgagcagttacgtcttcaaggactttatacccacaggtacgcattttagcatcgttgtaatcgacaggaatacttactacatcacgaggatgtactttaaccgaaacgatacggtctgaaccactaccgaagtgtcggatataagatttagagcaaacgtgcagaccggtagagcaggtgcgttcgtcgtcttcgtcaacctggttacgaggcatggtaacttctttaccaggactgttatcaaacttaccagatgcacagtcaaagtagttagaacgaactaccttccaaccgataaagtgaccatcgtcagtaatttcgatgtcgtttgcattcaggaagtcaaacagacgataaacagctttacggctcgggttcagcatcaggttttccaggaacggcagataacgttcgaagtcttcaccattttccatcgctgaaataatacgttcagtcagaccagatttcagttcaatgtccttataatacagagcaccatcttcgatacggacgttgcctttaacaaatttagcaataccgcgttcaatgttgatgtggtcgatggcttcttcaattttgccttcagccagtttcatcaaggccgatttaaaacctggatgacttgggtctgcattataagtggtacgaccttcagtgatagaaatgaacttgcttgaagcggcccactggaattcgcgtttaaccggagctttagcgacaggttcgcgctctttaaaaacacggcggatcgtatcagtcgaaacaccgtaaatttcagctagttcttttttattgtaaagaccaccgttaaaaccttttacgattgcatctttttcattctcggacagacatagtacagccattattcacctctattgtttagattgttcggctgcttcaagagcagccatgattttaacgatatcgtcgatttgggcctgttccaggtgccattcgttcagaatggtatcaataactggatatttttcatggaactctttcaatttagctgcgaaaacgttcgtagatgtttcttccagtctattataaatctgattacataaagctaaatcagtattatctttcactgtgacattgctcaaccgctggttcatattaaccaggcgattcaacgaatccgaattagcattaccttctacaaagtgagtcagaaggaacccaagtttcttcttattaataatgtgattaatcacacgattgctacggaaatttcttgggagatagcaatcgtaatccacggcatctatagcatcaatataccgatcgatgatataagccatcatatcaacaagattttcgttttcaaataacgctttacgacacccggatggacgcataaccaagaactctgtgataccacattcttgagccaaaatgcgagcatctgtatcgttaaagcagctgatatcagatttagccgggaaggtcatgaaatcatcacgattgcgaagcaacacaaaaccttccagttcagagagttcactagaggttaacttaaggttttcaatagtccaaccatttttctcagaatacgtgtaccgagcaccgttcggtgaagccggacgtttctctgcaggcccatcgctttctactttaggcagcttagcgcgcagttcttcgcattcagttactttgtatgtaacgacttcatcttcagccatcacttcaatagctttctttaagaaagcctgctgcagttctgactctggattaataactagaacgaaatcgtaactgccaatcttaccagcgtgtttaagagccctgacagttgctacccgcttagaagtcttgtcatcgataagaacagtcaatttcttcttatctatgcctaagattgaatctacataaatcttagaacgcccaccatagctgtttttgaaacggtataatttaacatcatcaccgccgtatgctacagcaccagagttcaccgccatatcacgaagcttagtgatatcgtactttgccaggatggctgtaatagaacccaacttagttttaatacccgaattggcaatgatgttacgctcggcacggctaaactcattatacctacgaaccagttcacgctcgttagtgatttcgtctagttcttgaatgtctctctcaagatactcttggttaatcttagagacacgggcctggatatttgccactgtgtctggatcaagagataactcttcgcgagacggagtgatatccagttcacccagagggaacttaatatacacccgtgaataccgagcacgaagccatgaatctttaacaccagggacgtcgttcaagggatatacaatcttaccatagattgcatagataccgttattttcgtagccgttgtactggtctgatgtgaatacatcttggtccgggaagaaatcaacttccatctgggttcctttcagaactacagaatctttacccatagggcgaagaacatatttgatttcatgctgccatgagccgatgtcatcggttttgaccggtacagtgatttccaaaccagtcgtttcgtcttcagccatttcttcatcaaaggtaggacgaattttaggcagtccgccgtccatcattacagtatagccacgagatcgaccgccgtggttagatactactgtgaacgtgttggtatagcttaatggagatttagaacccagacccagagcaccgataaagtcgttgctattgttcttggtagattcgaagaaagtagtgtacaggttaatcataccatcttcatcaagacccggaccgaagtcacgaataacaaatcgcgggtcaagacgagaaggaaccttaatttcgaatggacgagtacaaccattcaggaagtgagcatcgatacagttagtagagagttcacgaacgattgcacgaattttgtttttgtacaggttagaagacagaacacggaacgctttggctgaggctttaatcgtgaagtcggttgatttaccaccagagcccattacaatttcatcatcagttacgagtttcattttataccttaatcattatgtaatttaatcaattcggcgcactctaagagctcttcggccgatgcacagtcgtgggttattttaatacgaatatctgcgaagcgttctttaaacaactcagcttcgtcgatatcaaagaaccgttgaatcattctatactctttgaatatagcattatctaacaagttcaagttaactctatagcttcgcattctggaccaccttatgttggacgtactcacggatagaaccaagctcagccaggattcgtctcatttcacccattgtactcttttcttcacggtgcatgtaaatgagctttaaagttgagtcacgttcaacgctggttaactcctggttcattttaatcttatcggctatgtttcttacagccaacaggtactttttcttcctggcggcgtctgagtctataaattcaacacgcctaattgcagattccattaccattctggctatgttatctaaattaactatcgcattattttgcattaccagattcatataacctccaaagggccgaagccctttaattaagcggccatccaagctttacgcttagatgcatctttacccatcagcatttcgaacaggtctttccaattttctggtagtttaactacatcataaacaggttcttggataacacgttcatattcatcacgagttagagaaccgaggcctttaatatatcgaatgctatgcttaccaagagattctttagctttgtcgtaagaaggcagatcgtagaaccattcttggtttttaccgacttgggcgataataacaggagtttttacaaaacgaattcgaccctgctcaaatagttccggccagtgactgaagaaagccaacagcgaaggatagattgaacctgtaccgtcaacgtcggcatcagtcatgatagcgatgtttttatagttcataccttcggcagattcaccgatagttaatccagtgattgcacagatatcaaaggcttctttgttctttaggatatctacagcagacataccccaggtattcataaacttaccacgtaatggatatccgccgtgaagttctctgttacgaacttcaatcaaataaccaattgcagagtcaccttctgttaagaacagggttgtgtcggcatctttgccgtacatgttagccttgatatgcttttctactttagctttagcagcttttttattagctttagtttcagcggccttttcggcagctagttttcgagctaatgcagcttcgacgataggcataataaggccttcgtctttcaagatgctttgcgcaatctttttagcatcaattttaatatggctacggatctcaccgaaaggagatgtcaatcgttctttagtctgagaatcaaagcgcatatttttcatattgcgaatgaacatcaacatcgttaagcattctttaacacgagacttagttacttcaatacctttgtacttacgcttaataccaggcagaaggtgttcacagatatcatcaaacacacattcaacatggtgaccgccgttcttagtatggatcccattaacataagttaggtggcggaagccgtcaggagatgaagtgaatgctatagaaacattatctgtttcttggaatactatgttctcaccgaactgcttagcaaactttttaaaattaccttggatctttttaccattgaatttaaattcaatcccagggtaaataacagccagagtttgaatttggtctaacattatttgaacataggtatcgtcaaactgattagtttcaaaatggctaaaatctggaataaacgaaaccttggtccctttgtatttcgccggttttgatttccaagaaatattgtcaagaccattagaacagtttacagttagttcattagtgccgtcagaggtgatacctgtaaatttaattgaaaaaatattggttagactggagcctaccccgttcatgcctgttgtgactcgatttgcatcatcgctaaagttaccgcctgagcgaacttttgtccaggccgcgacaggtccaggaatttcttcgccttcaggagtaacaaccatagattgcgggataccgcgcccgttatcttctacaatcacttcagacgttttaaggtcgatgctaaccgaaattttattagcaaatttaaagttggttctaattgcttcatcgatagagttattagttatttcttcaataagcttaatcaaaccaggaacatattttgcctttttatattcaccaaataaaaacacctcacgttcttcgtttgatacactaccaatatacatagaaggacgggctttcacatgggctacatctgaaaggatctgaatttcgttcttaatcactatattttctctcgaattggcgtaaaatatttttatatgagccttcaggaaatccgcgtttaatactttctttcatgaacttagacaacttaggcttgtctaattctatccataatttttctaaagcagattcatgctcccacacaggacttttacggtttttaattccacacttaatcaaagcttctctggtatgagttttaccgaagaaaggattattttctttcgacattgctttagagtgttcagggcgtttaatgccaaacataggattaagttcgccgatcttacagtctgactggactttaatcgtttcatcgctatgagttttaccgaagaatgggttattttcttctttaacatccataccaaagcatccatcaactgtcgcgtaggccatattaaaaaataatggatttttgaccacctcgtatagtttttggtaatacaactcacaaaatgtggcttcttctcgtgtatcaaattcgccaattataacactatcgaatagatcagggtgttcttctaattctttatcatacacggatttatactttttagatttaaccgtgccgtggtatccatttaaatgtttgctaagataagtagaccctatgtaaaatggtggtaacttatcaccggaatatattgtcagatatgttacatatttcatggaggttatattatcctgtattctaaaaagcaaaagggccgaagcccttatttcttacgaagtattacagtgcggccgttactaagtttaaattctcgcatttcaccggaggccattttaactcgaggtttaaagcccattaatagtcacctgttttaagaccaccatagtgaactgccggagcagacacagtacgggtacattttaccttcgcaatttaggaacgggcactctaccggctcgtcccgtccagagattttacgaatatactcgcgctcttcgtcacaggcttcacatttatagttatacgttggcaaaacgagttccttctaaaagtttaattgcggtcaaacgagatttttcatctgatacggttagttcgatctttgcaggtccttcaatgactagtggagctggctcaacagtaccgatgtcgttctcagcctcttgtggttcatcgagttcgccgagttcgccgagctcaccaagctcatcgagatattcttgaacaactatatctcctgtgatgttgtttttgaaatcgatccaacgtctaaagaacggacgttctgcttgaactaacgccagattgattttctggttacctacttgaatagatttaacacgagggctgccaaggctataatcaacagttagaaccttaaaccggttcaaatgaactagttcagcaaaacgaatgttcaatttactgcgttgaactaaaccttttaaatcagtacagatgtaggtttcaccctcttcccatgagcctgagtcaccaccaaagccacagacttcaacaaagaattcgtccatctcggcgcgggttatgtagagacaatctttactatatgtaagagtagcgccgcttttaaactggatacctacgacatcgtcaccggcaacctgaataactttaaaaatgctattctggatagcattagcaatatcaatgttcgaagcatagctggcttcaaactgtgcacgggcttcatcgctgataaagcggaaatatttgttttgcattttaagcctcgtaggtttctttccggtaatcggtaccgttttcagagatttcacggaaaatagcataagccggaacagtgtcgcctaatttgttatagacatacacgatttgggtatagcataaaaattcagtgatatctttctgtacaactactagatctggattaaacagaacatcttcgaattcgtcgcgatttgaacttgtggtagctacaactttcattttattttcctctcatttggttggtaggagcatagtatcacgctcctaccaggttgtaaactacttagtgataatgtttttcactgcagaacgcggaaccacagagtaatcaccgtcgtgaactacgttcagcagttcaacaccatcttcaacccactggtcagaaacccagccacacacgcggatgaaaggagtttcgatttgaactgctttacacagaagatcatcacggatatcgtagtcatcatcatcgagaaccacagtcccaatcactgatacatattcaggtgatacgtagccaaagaccccgttagaagaaataacgtattctttaatttcgccaagccaaccgaaacgaacggcatctacaataccggatttaccggcgatacgggaacgggaccgagtggatacatagaccaaagaatcaatagggatcattttatttccttagcgaatacagttagaaagttcaataccgacgtcaacgccaaaattataaccagcttcccaacctttcgccatagttgctttaacaactaaaaccatacttggggagatttcaggaagaatggtcgagttaaaccattcttcaaagttttcatcatactcaaaatcgttcatcgtgttttactcaatgagagtggatcggcttcagcttcagacgggcattcatccaggccaagagcgtaacgctgtgcatactttaacatcaaaatatctttagcacaatcgtgaagactgtcatgagctacgaagcctttaagggtgccattaggcagaggagttgtggtcataccgcgtactgtactgtatgcttcaatagcagtacggatatcacgctgattccagaacttaacaggctcgagcttaaaggtatcgatttcattttcagggatgccttcagcacgatacaattcacgaatcatatctgtgaaaataggaatatcgaagctcattccacggcaccacatctggctgttccatggatctacaccttgttctcgaatccaatccaggacaatcttaatgccttcgataactgttttatcttcgtcagatgggactaagttcttacgggcttctggagattggtccttccaccaagctaatgtcgacttagaaaataatctagtgcctttctgtgaagcgaggtcgaatttaacacgaaggcctttagaaataagttcatctaaagattgaaccacttcagggtctgggttataagcaattaaactcagatcaattaccgcagagttagaagttgtagcaaatgtttcgtagtcgataataatatcaatcatagtttaccttcataagcaatggttgacataacttcaaccaaattgctaggaataatgatgtctggggttgcacctagataagatgcaacgctaatagcattttcacagatgcaacgaaccttatacatcgcttcagcttggtgaggcatcatggtttcatggcgagtgtcataagattcaattaatttgttagctgtgtattcgttaatacgtagcatagttcacctatacataataaacatcgtgccggcctcgtgtagcgccgacatacaatagttgtctagccaattcaacatcatttactacatgaatacatggtgtatatagaaagctagtatctactgataacccttgggctttatggaatgttgaagccggcagaggttttaccttatggaacatacgtttagcggcccaaaaagatttccaaggggcctttccacctttctgccagttgcgataagtatcagcagccttagccaaaaagaactggaacttattttgttcttgttcatcagagataacgttaatagtttctagatgataatcttcatccttgtcataagtttctacagctaaccgccagtgtcgaatcatatattcgccggagacacctgtacaagaaacaaatgatgaaacatattcggcactcacaatacgaacatactgcccgttattaaatttaaggtcattaaaccttttaccttcaaattcaagctctttgatcaaaggctcctgcattactataacttcacccttgataaaagcatcttcagtctcaagaattcgtcgtcgaataatagaatttagtttatcgacagatttattcgtgaaagcaaacatcttgttttcgaacatatcttcggggtctttaacgatttcaaaatactgcatcatgaaatctttaagagccgtggttgacgtgaacccgtgaacaccatggccatcttgttggtaatcatagatccatttaccgttacggatatctgtagctactttaatgataggagcgttacttcgcatcacttcatcaagttcaagctggtcaaaatctttatgggtgaaaaacggcgatagagccggttcagtagagccaggttctacaggacgaatctgagccttatcacctatagcaatgacaagacaatacctcggaatggcggccatcagaatccggaacagttttcggtcgtacatagaggcttcgtcacaaactactacccgtaattcagaaacgtctacttcgcctttttgctcaaatgttatagagtcttcgtacgtcgtcgggttaattttcaacaagctgtggattgtccgagcttcgataccggacaatttacttaatacttttttagcggcatgcgtaggagccgctaaaacgacgccagatactccttgagaaatcaagtaatcaacgatgaatttagtcatcgtagttttaccagttccagccggaccatttaaagtgatatggtttcctttaccggctttaatacgactgataatatagtcaaaggctttcttctggcctttgttcagcatatctaaagtaatcaagctaattttacccttttaacatgcagtgtgctaatgatttggcggagggatttaagttcgtcatcactatagtgcgttgtcacaataagcactttagggaaccaccacttacgggggacgactcgacgctccacagacttaactcgggtaacaaatttatgttccaggtaagcttttaaagcctcatattcttttttagctttgccttcatcagagaagacttggcagcatccaccgtactcataaggaagtacaaatccagatttgtccttatacaccagagcatatccatagtgcatcatcattacattttacctttaattaattggagcagtgaacaattcaatggtagtcctttttccagtttcttggtatccaaccagctacgtttctctaatcgtttaagagcttcaacaattataccatagatacggacctgttcctctgctttagagagcttagtggcgttcttagcgctacgcccgtcacgaagagcaaacagcttagcttcttgacggcctatctcagccttgccgccttcaatgcgagctttgagagaagctaccattactttaccagcttcatcgagggtttcttcagataaacgagaattcagggctgcaattcttcctttcattcgagccttaatagcttcaatatttttctcaataatctcaattttagctttggtttcgtccgctaaagttacaggcctgttatctgaaccacgaacaatgcgagctgatttttctttggccagagattccatctgctcaatagagtaatctcttcttgcagagttgtatttctctttgacaggaatcaagttacctatcacgtaacctttgtcgttgtcccaacgctcaagggtcattgagtcgggcccaaactcagcgaatttctcgccagagtaagcacaatgtgtttgagctaaaatgttagccatgtactcaaaggtaagattgaattctttgcctctggacttggcagattcaaaagttttagccagacgacgtgctacgataacttggttagatgcttgcatgattttatcctcaatgttggtgtagaagtatagtaacatgctcctacaccattgtaaactactgtttgtgagacccgtgctcagcgattttgcggtcgcctaagaagattttgcagaggcagttatcgttgacttctgcgtactgctgtgcaacccagtggacgtcaggcccgaagatagttttttcgaagctagagtggtagtgttcgccatctatagtgtaccataacatgattaagaatttgtgcattttgaacccttatttgctttaaaaatttaaatggtataatggtttcatggatctttggcttcaggctattaccagctgacaagttccagatgaagaatagtataatccgttgtgtttgtatctggattagatttatcttcaatacgtaatatgcggtacgctgcttccttcggaagcataaactcacactcaccttgaaccatatctaacttatcctcgcgttgatcttcaactggtactaaacccatgtactcttcatcaggagcaccaagaagaatattagtgatatcttcttgatagttgtatgcccacgggcagttctgtatgctcagaatcagatttgaatcgtaatgccattttgaagcaaactgcatagccgtagagaaatcagagctgaagcttgtaacacggtctaaagtaaatgtatcaccttcagccagattataaagtttttgcgcttcaatcagtgtcaccccacgatataattctgcaggcactgcagtagacatatgctttcgtacgatagggttcagcctggaatgaatgagttcatcattcttatcattcaaacaaagccacagagtactttgttccatatcagtgaatttttcttccactttagactggatactttgacgaactttttcttctgaactgatttggataagcatgttagtatctcctgtttggtgtaagagatactaacacgttaaaaagaggatgtaaacaccttggatttatttccaaggcgcccacggcggagggtctcggtagtaagaagccagctcttctagagcggcgggagggagctttattccgtgtttctgtatgatcatatcaagttcgttaaccaagtcctcaggcggcgatacaggctctttagcggcggcctcgaacatttcaaacagatccattacataaaccactctaacggctggtattgacggatagctgcggccttttcataatcttctacagcacgtttaaggttagtagacggtacccagtccgcggcatcagcattcatgtagtcccagatcattttagccaaataccgaatatcatcagatgctgtattaagaataatcttatggcctttctcaatggtaccactgctatcgtaatcaaaaggtgtttcaaagcagctaacatgtttgtagccattcttaataagagcgtcgtgaacaccccatgggctacctttacgataattcacatcatacatatgcatgatacgaacttgcccatattcaatactaggcacccagcttgtatctaggaatttgtcaatcaaggcacggacgtcgtcagcgtacatgttgtataatgccacatcaaaggttcgaatagtatcttcaacacgaccgtctttatcggccaagctaatacctactttatagatttttgcgtctgccacaataggctccttcagtcattttgttttcttcaaaccacttatcattcgcagccattatagctggccctgccttaagcagaaaaatcattgctctgatgcctctataccaggcgccaaaatcagatttcttaagtgggcttttgtagatcgcgtgttgataattaggcttagtcgcaactaactgagcctgagtcacaactggagtaactgctgccagagtcatataaacttcctgcataaactgctgccgccgtagcagcaattattggggtagaatcaacgtagtgtgaagtataattagagctagaactagaaccggacaaaggaaccatactattccggttacgctttctagcttgttccgcctgttcttggatttccttaaatctagaggcattagcaatagtcacttcatctaaagctttttgtaatggggtacgggtgtctttaataacctcttccatcatgccatcaccaacataaacataaacatattcacgctctttaacgaacgacggcttttcaggaacaggccgtggtgcaaataaattctttaaccaattaatcatggaatcaccagatatttgttagccagttcaataacttccttttcactgtacttgataagttttttctttgcttcattattgcgatccttttctaaagcatcccagaaatcttggcccggagatttctcgttagcgagagaccaatctaagaatcgtttaacccaattcatacgcggaaagtctcaaatgaaatatgagttattttacgcttgcctttagagaatatccagtactggacttcaatagaagcttcaagggttgtgcctacttcacggtaagcatgagtaataacgtcaaaataacaatatgaatctttaccatggagtaaagtgtaatgacgttcaattagttcattaataccaccacagttaccaataggtttacgccaaggtgtacttttaaccatcttcatttcctcatgttgttttaagtattctacctactctactaaaagcaaaaaaggactccagaaggggtccttaatattataccccagcgtcgtccggggttgcttcaaacatttccgcattagcagtagcccaagccgctgcatcatcaattaccgtagaataagcaggcttttcagacgggaaagtttgatactgagcatcagcaatgcggtgcgagtcggaatatactttgaaatcaaccgatacctcggtgcctttaacttcaccaccggctacggtatgatcaaaagttttaatatttacataagccatattatacccctttatgattaatatcaggaatatttataactcatttttactaactcttttagaagctcttcattggcttcatcgaccgcaatacgaaacacctcatttaaagggtctaatgcttttaagatttctcggtcgatttcacgagtaatttcttcttgaaggacctttactaaggccctttctttttgttttcttttgatttttaaacggcgtttagatattcttgtagccattagtaaccacggtcttgacgggcaaagttttcagcattcttcatataatacaatttgaaaatttcttcagccgtcatacctaggccctggaacatgttcagcacgaaatgaagaatatcgatcatttcgaatttaatttcaagctggtctttaggagacagttcgctaatcatggtattacgtcgttcggcgtgttgagctttccaaggcttccagactgcagatgcatctttctcaccgttagacataccgcctaatgaagtcagaagttcacggaactcgtcatcgatatagtctttctggttgcgaagccagtcaaccacatcacctgcacgggctaatgcatcaggatgggcattgtgttcaggtttatcaatagccagacggacctgcagagatttttgcatatcaagcataacttgaagagggtcggaatgttttgctataaggctatcatatgcagcctgagctttatcaaccccatcaatcagttgagaacattcattaaaatgtgccatgttattcctttcattccagtgtggtaagtagagtaattatatactcagttctttttagcgttttcaaagaactctttagccaaacgccggttttctttttctttttctaaccgcgcttcttctttcttaaatagatctttgcatgcatctaggaaagaagcttcatcttctggggtttcaacaaacactgtattcatgtttgctaaacctattacaacagcttctttgtttgcatcaagccaagcaacgtctttcataggggctgtgcggtaaacttcagattcgatctgcttaaattggtcataggccatttttacgttacaacgatctaaataagcatcgccgaacttgtctaagacttctaaagaaactctgtatccatcagcttcgatgtagcctttagccacatgctcttttaagttgtctactatagatttaggtttagtttctttaacttctttaacttctttcatcggttctttaggtgctttatctactactgcgtaagcatacttttcattattaacaagttcttctatacgtgaagcatacacgtatgcaagaccttctacagtagtttgtttgtttctgacatttttaatccaagcccgctggtcttcaacaggcttttctttgattgcattataaaccttattaaggctagaatccaagtcagaaactaatgcatctgaacaaatcagcttttctactttagtagaagctttagagcagtcaaatgaagcagcttgagctgaaaaggatacggaagcgatagttaaagcaattgcagttaagatagttttcatggtaatctcctctttagtttgtaagagcactataccatgctcttacagagatgtaaactgcttattgaacaaaacctaagtttttagagatttctctgtagtgaatcattttatctaccttggcccacttagcatccacgtcttcagagaatctgaagtcagtttctagggtcaaatttagaacagcccctagaatatcattgagttcttcagttagtcgttctctgttagtcttgccggcgtattcagagtcgaagccgaactgcataattttagagcaaatctgtgctacctcattacactcttctgataacttaagaagtgcgtgctgggtgttattcatctataaatacctttaataggaggataatatgggaacgatattttaccaaatttggaaattatcagataaaaaagacaagaacttgatgttgggcttccttgccctagatgtgttcctatggaaccttttggtagtccctatagcggctacacatggagtggtactcccagaagttactatagagcatatattgagtattgtaagcttttttactggagttccatcttaaactttagcataacggcttaaccgcattttagccattaacccagaagcaatattcatattcaggtattcgagtatttcttcaggagtagccccttcgtccttaatcatatcattgatgtctttcgatgcccaaggagcattgtcccagaacacgacacgttcgccagcttctaccagcctcttcatacgtttaatggtatcctcatgccgaggttcattatccataatccaagcacggttctctttaaaaggaaccgtgttcaaatccatagacccacctgtaatagcaatagcattaggtataaacaatgaatctattggtccttccatgacccatacgagtcttgactcatccactgtatcgagcccgtagattttagttgcgtgttcgtgtgctttgattgtgatgtatttctgcggagcattttttcgaagtgcacgtccttgaaatgactcgatgtctcctcgtgcattgaagattgggataaccaagcgcggttcgctcttttcatctttatatgttcctggattaactgagttaacaagagcaggccattccatagtaaaccacaaacgtttccagtttacttcaggaatgcagcgggccttaacatacttaacaatagggtggtcggctggtaatctatccagacgctcacaatttggcaacctctcaatcacaggcatctttgctttaatcttttcagagatagatggggcctttttctccctatacatgttctctttacgacgttctagcaagaattcacggtacagcgtttcatctgtttctttaaggaacttggtgaaccaagccttataatcacagttgaagcagcctacacgtagtccaccctctacttcaaagcaccaaaaacgagctttcatcgggttcttctgagagtccccgcatataggacaacgacagtttaatttaaaagtacttcctgggagttttcggtaacgaggcagaacagacaatgcccgttctgcaaattcatagtcaacaaagttcatatttacctcttggagttattatatcactcttcagaaggcttatctttgcgctttttccgagaaagggtttcagggcccttattgacaacatcgccagtagttgtaccagaagcgatatcagttggagagccgccagaatcgccagcgaccatttcagataaagattgtttgtactgatcaagcaaagtcatagctttctccttaaatgctttatttatagcccgataacgtcgcagtggattccttcccaagaattctcaaattcctgccgctgaattatctgttcccagtcctttcggaaagcccggcgcatttttctcagttgtcgctttgtaggtttacagacaaatgtctcagacagaacgtgtccaaagacaactttatctgtgctttcacggtctaatactacttcccagtgagcgtcagacataataggacgcttagtgtagaggccagaaatacaggccttgtggtacataatataagttctcataatccaatccactctaaagtttctttagcattaaggttttcacagaaaagattagttgcggctacaactatctctccgttgttgaggcttttgatctgagctaattgatttttatcagcagctttttagagctcttttataactacgcctcgtagtacagacatatcagaagatatggctaactcgcacagcggagaactgtagtcagctttggcaaaggccggctgtgcgccacaggcagaaagagcgaaaattaaagaaagaatagcttttttcattatattttcctcaaaattaagccttattctacatctgaaagagatacgtctgcacgagagtcccgatcaagatttccgtcctggtctgcccaccacccacagacacgaacttcagagttctcgtgtttgtacagctgccgaacaaacatagctttagatttaccttttactttaacaggaaaaccatagcgaatttccgggcgggtaagataatggtaagcacactcgtacccatctaacacaaagccattagccgaaagacctaagttaatgaaagcccttccgttatacttttctaagtacttgttaggaaccttttcctgttcgctgacattataaagcccaccttttactagagtggcatctttatacccgggataagaattttcgtagttcatagtagttcctcgctttgtttgtgtaggagcatagtatcacgctcctacaccattgtaaactagaattttaaatcttctgctagtttatcgagatcagctcgcgatgaaacctttttctgaagattattagcagcttgcttcatctgggtgccttgggcctcacgctgggtattagtatgcgtcgggccgccttcttgggcaatttctacccagcgctggttgcctttgcgaacgccgatattgaacttgttattgatatttttatcgccatatcgagatttaatctgtttgattaactgttgcttcatctcggccagttctggggtttctattacagccagcataaagtctgctgtagccggtagacctgctgattctgcaacgtctgacatatcgacatcacttgaatcccaagcactacgtccagtctgagctgccgaccatatagccgtctcggtttcaaccgctaaaccacgaagttcttcagcaattgctttaactaatgtataactgttttcggtgtactgcttaatacgacaagaagcacagatacctaagtagtcgataatgatgattgttggaacaaagttctttttaagcttcagttcattcaacaatgcgcggaagttattggccgaagcaccgccggtagggtactgcttgataatcaaacgacctagagtggaagtcttacgccatctttccatcttggctttatattcagagtatgatacacacccgtcatcaatatcatcaagtgatacatcaagaaggttagcatcgatacgcttagcacatacttcttcggccatctccatagagatataaaggacattatgaccagtctgaagataatctgcagccaatgaacaaagacccagagacttacctacgttgacccctgccatcaaaatattcaatgtgccggtttcaacgccacctttggtaattttgttcaggatatccagtttaaatggaatcttacgagatttgttttgatacgctagccatcgagcttcgtagtcatccatccaatcatggccgatataactatcgaatgataccgataaggcttcacgcatgatgtctggaatggcacctaaaccaggcagacgtttatcccgttgcttttcgtctaattggtcattggcctggatttcaataattcgagaagtagcattatacattgccttctcttgaacatatttttctgtctctttggtgagccagtttaaatcttcaggggcatctgtaagtttagatagaagttctttagcaccgctcaattccacgtccgacatagaagacttgtctaacgcaatattaattgcagttttcgatggaattccattatactcattgacatggtgatgaatagctttaaacaaagtcagagcgggtcctcgttcaaagtattcatctttcatgtaaggccatactttattaaagaaagcctgattgaaaagcaaattagctaaaattgtttctaccacattgacctcttagaaaaataatcctcgctttttaggcaccatctcaaattgtcttttaagacactgcacgacgtgaggatataaaacgtctttatcagacggtgtactgaatttaacagccacttcaccgttcggcttaatgtctagttcatggatataaacgatgtgttcttcaccgtctaatcttatcaccatttcttggataacactagccattgcttctttgattatactatgggatttgtcgaagattctttgagaacgttcaaactccccttcttcaaggggagcttcagcttcaatttcttcggccagagactctaagtccaggtcttcgaagttattcttcatcggcgaaattttccagttcatcttcaatgtcagcagcactaggagctgatttggcttttaccggaattttagacgttggtttagaagataacagatcagcaaccgcatcgtcaacttctttaatagaagaaacagcaccgagtttatacttggtttcgattgcatcacggaacggcttatgtttaaacaaagggccccagaattctacgtcatctgtggctttagcacgccatgacttttcttcttgaaccatttcaccggtttcttcgtttaagaaagcacgagaataccagcctgctttaggtttaacaacgaagccgatttccgtggccagttcaagcaacccagagaacggatcgataccgcctttgaagttaacagtgatcgggaaagtagatttctcttgaaccgtacgagatttctcagctttaagagtaaaatcatacccagtcagttcagtaccttctttaacctggcgtttagagataaagaatacggtacttgcagaataaagaatacctgtaccgccgcccataacttctttaggatacatactgccgatttccatagctgtatggttaatagccacacaagggatatctttaatggtcagataaggcgtaacgatacggaacagagatttaagagatttagcacgagtcatgtcaccgacctgtttctcgtctaaagcatcttgtgtttctttcttagaagctgtgttaccgatagagtcgatgaacataatcaccttgtcaccacgttcaattgcttccagctggttgaccatatcgattttcagttgttcaactgactgaattggagtatggacaacacgttctaggtcaacgcccattgaacggaaataactttcagaagcaccaaattcactgtcgtaaaacagacaaatcgcatctggatatttcttcatatatgcagcaaccatggtcagaccaaacagggttttaaagtgtttggatggcgcagcaaagattgttaagccactttgtaaaccactattcaagctaccgcctaatgcgatgttcagcataggaattcgtgtcataacttcatcacgatcattgaacaattttgatttagtcagatcagcggtcagtttagtggtagaagctttaatcaggcgagatttcaaatcggacattaatatttaccattagtcaccattatatttttctcacgttgtttagaaagtaaagtaattatacacctaaggtttaacagcaattaaatctttaaacttactttgctttggcttcagccttagcgatacacttttccactttggaataagctgccaacctgtggttgttcagagctttatagttagcttcgtagctatgaatagaagaattcattaaacgctgctgaagtacggcttcatccagcttccagttgatttcacactgccgtttgaacggtgagattttaggctgttttgcttgctcaccagcgatgatggcatccatcttagcgtcgtgttctcgtttcatagccatcgcttcttcatggtcactagaatagtggacttgattagcgtttgcattacggacataacctatattgttaccaccaacagtaaagattgtacctacatcagaaagacgatacgggtatccttcagtctgagcacagccagtaagagttaatgcagccagtatgagaattgatttaagtttcataattcatagtttctccaaatgtgtaggaacactttaacacgctcctacaccattgtaaaccgcctggtttacaaaataaacttattaattaattaccacttggttataagcaggaatattatatggagaatttattttagcattaaaatagataaactctgctaacccagggtgaaacactttttcagggtcttcaaagtactggatagttggttgacccattagtacttggtagtattctttcttggtcaagcgaagaacatggatctttgcttcttcaggatacagttcacgtttgaaactcatgttcgggtctgtgatatacaagacatgatctgctgcaatagcgcattcgacaacttggtcgaaacgataacacggatcgctgatacggaatggatgaaaaataccatcaaggtggattggttccaggccttccgtataacgttccatgacactcgggttgatgactcgttgatctacaaagatacgacccggaattgcccctgccgctacgaggacgtctttctggccatgattaagaacaaacgttgctacagacttgttcacagattcaacgtcaatgtcaataaactcgtcaatataataccgaggattctcagggtctttagttatattaaaaacaaagaacacctcatgtttgccccggtatccagtaatgtcagtcactagataagagcagtcgtagtaatcaactaaagaatcaactacaaactggttctctttccagaaatgtttacgagtttcataagcattttccttgtaccaaagagggacaaattcaaactctgggaatagttctttacattcttcgatatcacttgcattacgtggaaccgcaatgatatcaccagcactggcacgattcaaatgtaactggaagttgccgtccttaaggacggcatactcaccggtttcatagcttcgcatactaaagattggtacacggaaataagccatcagataaaacctcttacataatcaaaatcacgttcaaagacgtgggctgaaaccatagtgtgagaatacgtacctaattgtacaccacattgatctgcaatgtattgcattaacttgccttgcagataaaagtccagctgcatcactacggcacagttctgtgaacgcatatgtgtatgggcataaagcttgccttcacggatatagtatgttatagaatctgtacacgggtactcgagcgattcatccgaatctagaagtgcttggtctcgttcttggagaatttggaacacgacacgtcgcgagttaggcttctctttaagctctttaagtagggctggtaactgggcagcaattctaggtccatagaaagtgttgaagtttgcaggcagtacatcacttttcggcttactaatgaacttagcaacattaggatattccttaaatgcttcagcggcatcagtaccaccagaaatcatgaattgccagaatgcttcagcatattcataactaatgcggttgatacgaggatcggtgaatttgaatgttgtcggatcggttacttcaattgaagcagaaccgatttcattacaacggccaatacgagaatcagtaacgaactgcggattgttgagaatctcttcattcagtactttgaatgcggtctggaaagacgggtatgaaatatgtttcattctgttgtgctctgacattaaaaatcctattatatactaaaagaggccgaagcctctttgcttattctggataacgaagttcgtcgtctgaactggtaacgtctacgatctgaatagaattcagcgggcggtcatttttagataactgacgcttatagtaacgctcacagtaagtacaagtactgccgcagacttcattagcgcaatcaaacgtaggatgtttgaaccaacgtttttcaagaaagccgtctaacagcgatgtttcaatgttcacggtatggctatagttagcatccgattcaccgttgtagatagtttcgagaggtttccacaactcaagaaggttaccttcaaattgctctgaagaatacgcctcaaggaccttcataatgtactcagttgagccagtacgtccagaaactttgaactgtgtgatgccaatatcacggtacaattttaggtcttgcggacgaacaaagcgggttcgtaaccagttaaaaggatcagtgtctcgagctttaatgcagtgttgcatcggatatccatttagtgactttgcgtcttcagctgtaacatctgtgctatggaaaatataacaagagtcacgataactacagtgagttgtataaccttttccggcgttagaacagaactcgttaacaagcacttcaaaaataattccgttttcattacaaaacgccgcggcctgcttcaagaagttaatcgaccggttcttatgaattccgcaacacactttcttaatgttgtattggtcatgaagatacttgatttgagtcacagcatcaacatgaagtatagttgaaacttcgatctcaatatctttattgacttcacgaacaatttccattaccactgggttagcgatagtgatacgccaaacacctatagaccaaagatactgaacgtactcttgaatagctttctttttccattcatcaagttctcgttttgaacctgggtttattgtattaaaagtatagttaaaacagattcctagttcattacagcgcttgacgtactcttcaagaaaagacttgtcaacgtcaggtaatctgaaatcaggccttgctgcgatgaaggccatttctctagtagagccatatacctcgttaataaggctgttcggatattttttgttgagttctacaattttatccaacaaagctaaatcgaaatttgttcctactttaaaaatattcattttgcatctcgttgttaactgacgcgatggtttttgcaggtcttactttaaattattttataagtttggctataggatttaaaagattcaaattagcctttattcattaaggctttgaattagtaatacacagctttgtcaacagtaattaggcctttgtattatttcttttactaacctcataattaatataaccattcaaacgttttaattctactgtatctacgttaagcagattattcttaccgtcatgattaagaatcttgaacacgttcttaaagtgggtttcatactgacgaatagtcatattgaactcatccttagtcagcttaataagatcgtcttcaaagtcctcgtccaacggattacgagttaaaataacctcgataacattgaactcttctttgaattcttcccagtctttaagttcttctaacgggtccatttcgccacgaagaaatccagagtaaacaatattactaggatagccacgatctaagatgtagacgaaattagggtctaaaaatttatataaggtttctactaaagccttatcattatcggtacctatagaaatacacttgccattaatcttcttaggaaaatcaataagcttaaaattagtattattaagtaacttgttaattaaagtagacttccctgagttatcagggccgtctacgacaataattttaggactcatggatgatacgccttgtatgtttcaaatgtgccatcttgaatcattttcttaaagtgatcaggacgaattgctcggtcgtcaataataaaatcataacttggtttatgtgtaagcagattatgatacttcagaccaattttttcaaggttctttacaagagcagggaccacttcagtcagaattcggccagggccacaagaggtcataccacgggccgtatacaaggttatctcgtgaccctcatcatagagcttgttaataatggccaccatttctgggtccggcgcaaaattcagataatcgcggttgctattccatatcgtgattgtgttgtcgatgtcgaagcagagattcattaataggccttatagtttaagaggaggctaaagcctcctcaacatcttaattacgaactaggattacccgattcgttcccactgatgggtgatgttaccaccaattggtttatattttacaccagtttctttatcaagcagttcccatttatcaggacatctggtaataatagaagctgtgatagggtctttaacttcagttacttctgtgccatcgataagtttacgtttacgaggctgacctttaagcagtacactcagctgatatagaccatgataataagcgccaatagccttaagcggattgttcttgaaatagcctgctaaagccatccaaataacagcaatccacagtttatgcttaaaggtacacataggaatatcatctaatggcattactttctcaatctcgacaaacagcctagtgccattccgagaaataccaccccatagtgggtctgcattaaatttatcgtacccatcaatagaataaagcactttagcttcatcataaatggtagggccatattggctattaccaaaatagccgcgcgggtctataattttaatatcacccgaatcggtaaacatgatgttagaataatgcgggtcgccatgaatcaactggtacggttctttatgctcagatagaatttctaatgcgtgttccagcagtttttctggcttacctactttaaaatcattgacatgggtaatgccttcgggtgcaaaaccttctaaaagttctttaatagactcgttgcggattaataccttatcaagaacttctttcttaacgtcagagtaccactgttcgtcggtaggaatatagatatcgccgcctaatgatttcagagcactgattactttatataccattaatacttgcgtatctttggtcatcagagggtacgcatctgccatggttttaccgtagattcgttccattttaataaattcgcctggtgtgaaatctacaatagtaggaataaatttcgattgtacagaattataccatttaagctctttagcttgaatttctttaccatactcattagtcgggattttaatagcgtgttgatccgtaaatttgagcttgttaaaatcacgattaatctcggaggttttatgtgcttcggccaatttaaccttatcgccaatgtcaataactgactctagcttacgctcggtcatataaaccatagaatctaaattgtcggcaaggtcttcaccgtagttgccttcaaaagaactgaacccaggccatttagctacttgatacagaccaaccacaccgccaccggtcccgatttcacggaaatacggttcttcaaaagtgaaacggcaatctgtaccaaaggtatagcaataatcattaccccattctactttgtgaccttctggaataatgtcacaccagttgaatagtacgttgtgtcctacaatatcatcagcaatacagtcaatagcgtgtgcagaacctatggatacatctacatgtcgaattgtgatatcgcttattccaaccgacttcatgtatccacgaactagcccgtcaaatttactatgaattactaaaataatttcatctgactgatttttgtacaaatcaaccagatgtttaaaaactgtatgttgtttgtagtttacaagcactttagggatttcattggtaattggatataagcgagacccaagaccggcacccaagataactactttacgcattttgtgttcctcaattgttgacggagccattatactacataataattaaagcgaagccctaaagtgattctagggcttcagccatctatactaccaccctaagatatcatctaaggtcgcgacatgttcataattgattctggccgccgtggtaaacccagacaacggtttaacaaacgttttctggaacaaagtcgaatagtcaaggtattttaatacatcttcacgaatagcaggattaatttgactacctgacggccatgcgatgcatttatcaccgaatgggttctggtcccgtaatggaagtaccattactttagaaccttcgacaattgcttctgcatcagggatgtttttggttgcacggttataagctaggattccacgaatatggaacgggcacttatatcctggataaccgttatcatcgtactgagcaatgttgtttgcagaactaacaccagcaatagtcatataatgctgcttacggaattcttgttcaaactctttatagtagtcttgtaatgagctttcaccttcttgaagcatacgacggatgcattctttcaacgctttctgacatgctttaggagtacttgatttttgagtttcaagacccataattttcattttagggtccgcataacgggtcccttccatgtcatacacattaagagcatatcgcttcttaccggtccagaaaccaccaagacctttagaccctaatggaggacaagcaatagcttctcggtccatgaacatcagctgttctttgttgttcatgtagtcgcacatatcttggaatgcacggccgatagccggctctaatttttctttagcaaacttatctaagaagtctactaaatggttcgtgtcgcggaacttgtcttcaccaatcttctcaattaatgggtctacacacatataaattgagtctgtgtcaccatagataacatacttatggttattggtcttcagtgtttcattgtagaactcgttcactcgacgttcaatccactgcagggccaactgaccgaacaaagtgattgccgttgcgttacgaagatcataataacggaagtgtacgttaccaagtgcaccataaagcgagttgataagtaacttacgacagatctgtgcagtcataccggctacttcagtacgagttgctttatcaagcatactcaacaagatagcttcgttcaaatcatgaagctgagccttaatactttcttccatatcgaaacggtaatcaagagtgggttctgatttgtcagaagaactctttggattatgcaatgcttctttaataagttccgcattacgttgcgccgccaacataaaccctttgtgaagtttacgctggtcgaaaactttcttaatttcgacaggtacaacaccatcgatatctttacgatacatccagccgttaggagagcaagagtactcttcgctcggttttggggcggtcccagcgatatattcatgaagaggtcgaacagcaaactggccgtgcaaagtttccgggcttatgttaacttgacgaataatacttggatacagagatgtcaagtcagcagatataacgtacttgtaactattaggagtaggctctttaacatatgcacctggataactttgtggaatgtggtgctttttctgaggaatgactttattgtcgttcttcaaagagttaaagatgattgcgtcccaagtcttaatagggctgaacacagactgcatcggcattttagcataataagtcatatctaacgccaggttcaagaactgacgttttttatcgatttgttgtactcgggcaacgtcgataatgttatacgaaatataccgttggtggttagtttcacgaagtttgttgatagggccgtcgtattctaatttacctacaccaagttcatactcagctacatagtcaaggcgatacgaaggctggttcgtaaaactaaatttcttatataaatctaggtagtcaagaacactgatacccaacggtgtgataatttcacgctcgtcaccaaaggtgtcggcaataattttgctattgactttacgaagagggcttaaacgtttagcagtcttttcaccaaacacattcttcagtcgattataaacgtacgggttatcgaaactttctacgttccagcctgtcagaataacaggtgtctgctgttcccacagattcaggtattcgagaagaagttcttgttcgttatcaaatggcagataaacaactcggtcgagaatatcctgagggatttcatcgccgccttctgcttcaggcttaccagctaatacagggtcccacttagatactttaccataaggagaattcaaaaggtcaaatacatagaacttatcagcaatactatcgtaatgagttaatgcatcgataggatacttggcctcattaggctttggaaattccggtgctgttacttcgatgtcatagttacactggcgaactaacgccgggttaaaatgaatttcacctgggtacctgtcagacaaataggccagcttgaagtcatccatgcccattgcatcctgcccgatgtcttccattctacgaatccagttacgagcttccttcatatccgggaatcgttttttcttacaattcattccatagatatctttgtactttgattcaacatcagaatgatagaacagggttggtttataatcaatctgacgagtttgttcaaccccatttgaatcgatgtatctctcgtgaatggtgttgcctaactgttcgatagttaaaaagaattctttcatttggttccttagacgagtaattgtcttttatttggtgaatgaattatactccaaaatgggaccgaagtcccattgcttaatctttaactaccgatagtatacttagatttcaaggtccattcggatttctgcttaaatcctataacacggaagttattagtcatttcgtgcattaatgtacgctggcctggggcaatctcaatcagaccccagtcttcaagcagccaagcaattgagtcacgtctctgttcatcttcttcagtcataaccacaggtcggccgtccagttttagcatttctttaaaatgaacaatatagtacaggccttgcttctgaagaatgtgacagctctgatataataccttatcacgattattagcaatacccatacgagtaagggtttctttaaccttcagaaaatcttctggctgttttaatgtaatttcaatcatatctaccattccaatgcttgttttttgagttgtttttgttctttcacatttttagtaatgctcttaaccatttcatccgtaacaagagctttagcttgttttaagaaagaaagtagattacctttagcgaccatagtcttatggtacatgtcagcatcatagacattaattttataaaacgcttgaattactttaagtataagcattttattcgaatcttcagttagtttagcccacttaccgtatcgcttaccttttggaacagcgtgtttcatgtagttaaagtgtgcttggtctgagaggccttgtcctactaagttcattacataaaccgctggcatgcattcagcatgttggcttaaggcattttcaatcatgaatttgctgtagtccatttgtgacacgttgatttgttgcttagtgtcattgattgcgtttattaatctaaagaactcactttcaggagattctttaaattggtctgcacatttctggaccgctgtccaatccttagtcagccaggcgatttggtgctcattgtattccggttcatcatcaaaaaagaataaactcatttccactgcatctcgatagccaattgaatgaacatatacacgatgtgaagttcggttgaagcagccacacctttatattggttgttttcaccaataatttcatacatacgtacgatacttggccctgtgaccatagtatacagttcagacgatagcttatctacgaaccatgcataatcggctgcgtatttcggggccaaagcccgaagagatttgatatctttatttcgaagtgcttcaataactgcttcgattgaatcggaggccttagtgacgacgttcaagatgcctgcatcaataattcctttagaactataatggtctagcatattaattgtcttgcgaagttcaggaaagttcttagatactaacgcagccagaactttacggtcttcaacaacaataccttcgttttcacaaatggcaatacagcgtttcaacatttcgcgttgcatcgatttggcgtcttcttcagaaggagaaccaaatgtgattacacgacagcgagactgaagtggcttgataataccatcaaggtcgttagcagtaataatgattgaacagttacttgaatattgttccatgaaagaacgtaagtgacgctgggcttcagctaagccactacggtcgaattcatcaataacaatgattttctgacgaccttccatagagatagaacttgcaaatcgggttaattcattacgaacaaaatcgattttacaatcagaaccgttgacaaacagcatctcagcattaacgtcatggcataatgctttagctacagtagttttgcctgttccaggtgaattactttggaggattaagtgaggaatctgccctttcttaataagagcctgaaatatttctttatcgcgagcaggaagaatacattcttcaattgtgcttggacgataacgttgttcaaacatgaactcatttttatttactgtcagcattaatattttcctcagttcagagggagccgtagctcccgtttaaattttattgaaagtcgaaagtcgaatcgatttccattgctgtgatgtaagtgtagttatcactttcaaatttagcagcagtttgtttcttaccgtcagccaggtttttaccccatagcatcagtttgtaatcggcttgaaccatcttcaagttatcgcggttaataacaaagttgaagttttcagtaccatcatactcaccgagagttaatgcatacttaggtttaataagttctgggtcttcagttttgttataagcctgcataacgatttcaccagacttattagaaatggtaatcgtatcaaggttcagaccacttgcaacacgtttcagctgttgaagatcttcagctttcagttcagtgataacgtttgctaccgggaagcttgctttggctttaggtacaacgatagtagatttatcggcaccggcccaatacaccgcagagcgattgctcttgattgcaatttgaccatcatcttgaagagttacttcagcatcgtcaccgaccagagacagaacacttagaaagccagacaggtcatagattgccagctcgttatcgatttcatcttggattgttgcatcagcataagtcgttccaataatggaacgggtcattacaaaattacctggagtcagaacgatgccagaattgatagtagcgaagtttttcagaactgcgatggtttctttagaaaatttcattttgtacctttcaaatcattatttagagaattcagcgataacttcttcagcgacgaattggccagcaataaccaactgttcatccgcatctacacagtagtcgtcttcaagacgttcaccgccattacgatctacaacgatcttagcaccggctttaatagaatcggcataatgggcccgcattaattctaaccatttatcgcttactgcggaatcaagggcttcataatatgcccagcgagcttcaggggttttgattttagctttaatagcggctcgtgtgccttcatcaagggccagtacccaagacttacgaattttgttttgattgttagggttcaaatcagtacgtacgtttttaacttggatatctttagcagtcaggatgttcataatataccttatcaattaatcgaagtattcttcaaggaaccatgcagaatgtctgttcgacattataagattgtaatctgtttctgtaaaagcatttttaatcatttgttcagtaacgatgtgttcatcaccactgaacgcgtttgtaagcctgaagcgtttcacttcaggccaggccagcaaccactggcctgtaattgcatcttcattcattccatcaccgtaaaccgaccaactttcttcatctgtagatgctggccgtaagcttgtgggtcatggtctcggtgactgataataaacacgttaacgtcagccatagtattcagtatagaacctatagattttataccttcggcatccgcagcagagtcaaaaatttcatcgaggaaaagacagtttattttaaccccggataccttttcggcaatatcacgccaggtaaacaacagggctatatcaatacgtgctttttcaccttgactaaatgacgcataactaaattcttctcgacctctagacttaatagtctcagagaactcttcattcagtgtgaatgagtaatcagcttccattactttcaaatactgattaatatgtttattaaacagcggaatatatttcttgataatagcgcctttaataccagtatctttcagcatatcagtgagaataccacggtggtatttttccatcactagcttagttttctcggccactaatttatctagttctacttgaagcaaagcaatctctgaagcatggtcgatgaattctgaagccgcttggtctagagcagctttaaccttcttagctttctcgaccgtagatactaacgcctgtttcttagagcgaatatcttgggcgagagattgctgggtcctaacattagcttcgtattcggcgactagcgtctccagtgactgtctgtgggcttctaaactagcggctgatgattcacattcatgaactttatccgctatcttagctacaacaggatcgcctggatgcaagatactcatacaactagggcattcgccaccgtcgtggtacattttaacaactttattgaaagaatttatcttattatgtaaagttgtagttttctgctgaatctcttgtagtgcaactctagggtcttcatctaaaacgatatcagctaaacgtgtagcagatttttcaatatcagatttaatttgacgagcttcagaagcaagttcgtcatacattgattgtaaacgagccacgttttcgccagatagtttcttttggcgttctacgttatcgttatagattttaatctgttgaatgataccttcttgacgagcgtcaatcacttggacctgagagttaatctcacggattgaactcttattcaacttatccatatctgccaacagagatacttcaagaagatcttcgacaagttttcttcgggccggagttgatagacccataaatggagtataaccagccgttccaagtacgacaatttgcttaaaggatgaatatgtcattccgataagctcttcgaaatatgcctggaaatcttttgaacttgcgctttcgtcaagtttttcgccgtctcgtgttatttcaaagatatttggtttctggccgcgcttgatataaaatgtgtgcccgtcgtactccatccagagttcaacaaccagattcttcttattgaaggagttaatcaattggcctttcttgatatcacggaacggcttgccaaataaagcaaatgtgatagcttcgagcatagtactcttaccaccaccatttttacctgtaattagagtcttatggcatttgtcaagttgaatatcgataggcgcttggcctaccgacataatgttttggtatttgaccctatttaacttaaaaactttcatgcactggcctcgatataaagttgagtagctaatgctttaagagcatcgatgtcatcttgagatgtagcgtcaggaagagcttcaatatattccatcatcatatcaagcagacccactacttcttcttcatcggcttcttcagtgtcaacagagttatctactttagaaactgtgcgaagttcatgaactactttttcaagctcactttcgaaggccggtagtttatcgtctaccttagtaataactacacgaactgctagatttttaaattcatttgcatcaaatggacccgttacagggtagaagattttcctgtgccaggtggtttcattagggacgaaatcaaatgtttgtagtcgagtgtcttgaacccagaatccgcgtggatcgttctcgtcacccgctgtaagcgtccaaggcgttccgatgtacttaacgtttgctgcgcttgatatggtgtggaagtgcccagaccacacttgtttatacgacttaaggaaatccggttcgagcccatgcgatttcattcctttatagaagtagaagccgttaagttcccagtgaccaatacaatactcagcagaagattctttgatgtgtttcatgatttctgttgtgttttcatcacacatccaaggaatcaggtcaatcaatgtaccgtcgaaatccatagtagtgggcttttcaataacagtaacgttatcatattttcccattacttcttgagccgcgttaggagttagagtatttttatagtggcagtcgtggttcccaacgatggtaatgagcttaatcccagcttcatccagttctttaatgattctgcgtgcaaactccatacacttgtgagtaatagccttacgaacatcaaagatatcgccatactgaattattgtatcaatcccattctctttggcgtatttgatgtggtctctgataccttttagttggatttcttgaacccacggatcatcggctttaacacctaagtgccagtcaccagagtggataattttcataatcacctcttcaaataaagatattttatcacccgctcttatagcagaaaagggccgaagccctttaaattttacgatacgtgatagtaccttcagctttagctttatcgtaagccatattgaaccggctaatcatttcattcttatcgctacggatctttgcataatcaatagccttttccaaggcttcaggagaatacatagttccattacgagttactacatctgctttagctattactgcttccatcagccttcaccaaagccgaccttgttttctacaacaccaagatcgtctacatcatggataaagtattcagaagaatcaggttctcttaccatttataccaccttttaatttgtgtagtgtcagcccatacaagctttttcggatcagctttaataatcacccctgttgagcccagaacacggtagtgcgtttctgatattttaacagccatagtaccattagctatagacagagtgaatcctgcgttaacctgcaaacgtttaaattttacctgcttgatcattgataatgtcccaaatgattttgcgagaggtctgccaaccggtcagaataatctcatcagtgtatggttggcgtaagatgtcacgagatttctcgatagcatacttatacgccgggaagttattgtcaagaacagctgcttgggcatgcttatatagccgctcaagttcgcgtcggttcttacgataaatttttttagctttaacttgcgcctgacgttctgcaatagcttgctgagccagaatcgcttcttcgatttcgtccttctcgacaccacgtttttctagtgcttcagtgatgctatcaatttcaatctcggtcattttataccttaggaatgtaatcaattactacgctaaatccgtcatcagaaacattatactgatgattaattaaagcagtttcggatgtgatatccgtatcgtgtgggttcttagggtcaatgtgaatatcaagatcaagcatttcccttagatacattttaagtaaataagggatagcgtcttggtcttgcacttcttctaaaaatccttcgaggttaatcttgagcctcatataaaaattccaattcattaccttcagataccggttcactctttttatcagaccctggtgccttgtatgctgaggtttcgtattgcgtcattttatcgtagatgtcctgaataaaggtttcatctgctaacgcaaccatatcatcgtcacgactatcataaacgttgtgaacgaagtagctatatttctttgccatttccttgcgttctttcttgatacgctgaacgaaggcattaaaacaagccattgtgatatatgcatgagggttggtgtatttggtttcgtcgaagttatgaagccctttaattgcggcttcaataccgtctgcaatcatttcttgcttccaagactgggtatatcctgagaagttgaatcgtttgctcagaccttcggctattaacatgatggcaaggccaatcgtgtcattttgtcgcactttagtcccttcgggagcatttctaacctgttccttccaagcacaaatagctttgtacaactccttattatttacgtaatcactcatagttggccccatcaaatagtatatattcattataacataggatgcgaagaggccgcttaaagcatattacagtttacgaagaatacagtacatttcaaataagcgttcacagatactaaggaactgttcatagcttaaagaaacagatattccgttttcttgttgatactgtaccaagcctttatataagcgttgataatggctatggttcagttcagacacgtggaaattatacgaatcgtctgatgcatcaccaaacggtaaatagtacacacccatgtaactatctacaataaagtgttcattgttagcaaccaaagttaagctgttcatcttagattccttgcgcattcatgggcttgttcaaatacaccgaaagcatcaacagaaataaatgtatctgaagaagtgtattcgtatacccaccagataccaaagtcttcttcaatgagccaatcgatgccattagatgaaccttcaatcaaaatgcgtccatcttcggtatgagttatcagataaccaaggtatccgagttcagctagttgttcttcagtcattaagataatcctcaagttctttaggtgtaagaccttcgacccagcttttactcaggcccgaataatcaggatggtcggcactaaacaaatagaatcggcactcgactggaaggccatgttctttgtatgttaaacccgatgtgcgcaggttaaggtaacgttgaaccaatataatagaagcatagctatcaactaaatacggttcaccatttctcagttctaagatacggatccgtatacgagaaggacagccgcgttggttaagaacaatcattttgccgccttaataattttcagatccttgaatcctttcttacgttgattcttcattttgcgaatacatgtgtcagaaatttcgccggccttcttgataaccggttgaacaccaaaagcatcaatatcgaattcgctaatgatataacagaccagcagttcgcgaatacgggctttaccgattttctgctcattttcgaccatagttccatgaaggtctttttcccactgatctaaaatttcaggagtaacaatgccacccttcttacggatttcttcgactttatcaaaagcaaaagagtgcagaacgtttttgatagcctgagacatagtattttcctctgtggtttaaatttttattatccaaggaggacattatactcggtcctcacgagttcttaaactacgagtgttgccagccttcgttggctttgcgagcgtagtatttgtcagttttgagttcagtttcagaatcgtagttcagtttcagacgacgtttgtcggctcgcgcatagcgattctgatcttctttaactgcagagtccaggcctttccaccgcttaggcttatcagagtggaagatgttatctgccacggtttcatcggagatgcctgctggagcctgacggcgccctgaccagtattcacctttcgatttgatatctttacgacggtatgttttacccattaaaatatttccaaatgttgattaattacactagccatatgcgaagcttcatcttcagttattttaacgcctatttctttaagcttagtttgaagatggacatattggccctttttaataaagcatacttttgaaccaatagagaattcaatttggattcggcctagttcagcagtgggccacatagtgatgaacataactttgcattcatcaacgatacaacgaataattacctttgcatcttcaattttaatcattagattaaccccaatactaaacggccaatctcgtttcgctcgtaatcgcacatctcaggaatcaaagcaaccgcggcattaatcgctttgccaacatgagctttagcagccatggtattgcactcagtacacttcccacgactacagaagaagactgtagaaccgcgaacctcgatcataaggtcctgagtatacccgtttgaaacttcgacttgcacgtgagcgatgatgtggcgttggatttcgacagttttcactttgtatctccgttgttagtgtaggagtatactaacatgactaaagggcgttgtaaacaccctaatcttcaattaaatctcggtcatagcctttgtcaataaggaactgttggaaatctttaagagatgggatgaactggttatctacaaagataacaggatacttgatagagagtgaagggaattggcctagacgtttagccagagattcgatgagtggtctatcataaacaggcccggtgtcaccaggacttattacgtcgataaaagtatattcaacgttcaaagaggccaaaaggcctcttatccaatgacatccaggacatctccagacttgttctgggatgccgtagatttctatattcatttgaaaagcttttcaatcttattagtaagctcttccattcgacgagtcatttcttctttagaaacactcggttgcttagtaccacgaatagcttcagcaaccataatcagtgcaatggctgggactgcaaccagagcagagaagaacagaacgatataaacgatgatgtttgctacgatatcacggaacttagtcattttaatccttagtaagagaaaaagaacaggaaggaaaacatcgctgggaattcagagccgaaacgtagaacggtttcattgccacagtcgataacgtcgttcacaaagttcataatcattttaacgatttcctcagttgttttttgaatgaagcctgaagcttcgttttagtgtcggattcattatatacaaatccggctttaagcatttcttgaatcatctcttctttattgagacggccaaattcttttgacttgtcagtcacgtactctggatggatgttagctccagagtagtctttttcgaggtacgccaccaattctttcaaccaaacaaggtagtcaatatcttgacctttcagacctgaacggttgaactggtgtttaatgcgtccctcaacgacgttgcatagattacagagcaatgcacgcaccttgccagcttgaggacctgataaagagtgatcatggtctaagtgattggcttgtacgtcattatctagagggcgtttacataaagggcatacaccgccttgcaagtcaaatagtctttctttttcttctttgtagagtttaccagccaataacatagattcacctcataagtagatgaatctatttattattagaatggtctgtcagaaaatctcagctgagcttcaagccacttaatatgttcaatagtagctttaatcacgttcgcgtcgtaataattatactcagcgtcaaattccttttcaatacgttttaagcgatcaggtaggtactggccgtcgaagtaacctgtgctagctatagaaccaaaagattcaggcgggatttctttaatttcgtccatagaggccggggcccaaagacaccagaaagatgaatctacagaatcaatatcaataacggttccatcttccaaaataatacttttaatgccgggcttttggtctggttcttcagaaccagtacgtagaaccttgaattttacacctactttcaactgtggaaacagcactgaagttccataaccgtcttcattatcttctttaacgatttcaaaacatttaccaatcataataatcctctaaatcaagtagatcatttacagtaggttcatcatcataacatgattcagactcggtgtaaaccggttcttcaggctcgagtgtttcccaccgagcactataccatggcttactcatcgcgccagtagctagaaacttcgaagtcgggaccgccgtattcccacgaccaagggccaacagggtcgtagtctacttcaccggtttctttattatagacttctttataatcagccggttcaagacccacgtattgccactgaactgtataagctacgcctttaataacaacttcattttcgccataagcattttggacggcccagtcaataccgagttcattagcgcgtttgaccatgaattcataaagcatccattcaaggtcttcttcacctttggcttcatttaaaacgattatttcatctttcatagcgattccataaattcacaaagttcttcacgaactacagtatcagaccaaccccattgcttagcttcatctttaatagactgaggacaatggaagaaaattgtaccgaccttatggtcggtttccagttcacagttcagaaaatctgctgtatctttaaattcggcaaattcttgatcgttcatttgaagttccagaaagcagcgacgattaaagcaattggccagaacaagaagcctgcagtgaaaactgtacctggtgcagaaccgtcatctaaagcaactaaagttttgccgtagccaataccgataacaaaataagcaataagaattaagaatactgtagtcatttataagttgctcgtagttcgtcaaaaccaccgatgtgtgtgccgtcaggtgcaaaaatctgaggcatcgtcagacccactttgctctcacgattaagacgtttaagcaggtcggcaataacgttgtcatcaaaaacacctttttcaggcatgacattgatgaattcgaatggctcctttttgattgtaaggaagcgtttcgcattatcgcaatacgggcagcggtgaatagttgaatcataaccgaatattgtgtacacttttctgttccttaacttgaatcatgaattctttataagcatctttatatgcaggactagcgatagcgtcccaatatgattggatcggagccgttttaattttcagactacgacggatttcgtcatggatatctgaatgaactttattataactcttagtcaatgcagattttaatacgctgaaatcaggaatctgatcatgctcttcagaataagcaattaataagcgaacaatagctcgttcggcttcttccagatattttttacgtttagccattataaccccgggaaagctttcttgattttctctgctacagcctggtcgatgattgaagcaaagttctgattaacacggtcaacaatgattttctcgatacgacgagtagcagattctattttgtattcgatatctttcattgctttatcggtagcattcttaattacatcgctaataatagagtcaatagcattacgtgcttcgcggttagcagcttcgcgaagacgatctttaagaacactagaggtttcataaggagccccataaccacgacggctgaaccatgattcgacttctttctgaacagctgtcgatacatcaggaacaactaagccgtaggcattgatttcatcttgaatcagtttacgaactttgttgcctgtatctttaacgataaggtctttagcaatgttagagataacagattgctgtaactgagaataagcttctgtgccttctgggaacagctgtcttactgcgtaggtgtctaatttaatactaatcatttcaatgttctctcaaacttatgtttgcaggctcgacatttcattttcagaatatcagagctccagtcaactaattgtacttgcatactactacatttttcacaaggtacaacttgttttgctgcagcttcgcgtctatcgaccatttctaaggctgctttccagtcgatttcaaaatcctcgtcatccgtgacgaggtcagcttttaatttatttctcatttcagtgcctgaattgcgcgcaacaacttgccacgctgggttgtaatgttggcaagatgcttacgtgcatcttccaccttctgttctgcttctttaaccatatcatcgagcttggatactacttcaagcatctgggaagcaaaatggcgttcggctgggactaactcaggctgagcaactgtagcgataaaggatttatctacagtatattttgacgaagagactttaccgtttagaatttcttcatcaaactctttagcaggcttagtatctttcaggaatactaagaaagtgccactatgtccgttagctggtttccattcataagaagaaacgctaggaataatacacagggcctgtgcaacctgctctttaacaacagtcagagtacgaaaatctttgtgtgctttgtctttgttgatacgaatatcaatacagactgagttagtcaggccaagcatagaaggacgcttagcaatcacttgaacagttttctgatgatcgaacagttgatggcgatttgtatcacgcattgttttagaagcaagcttcagaatcagatcacggtcgtagttgaattggctgatgaagtaatcaacctggttagtgataactgcttcaccaccacgatattctgctgctcgcagatcatagcgctggcgagcgcttgaaacagtgccaaaattaccgaggcgtttacgagccatgatgttagataggatacgagaatgcttaaagaattctttgaaatcgtaatggtgactaaagcctgtacgccacttacgactctgagatgagttaaacagatgagtaaaatcgccgaattcattcttcagacgattagacaggacctcaatacgttttgctttagggaatcctaccgtttcagcctgggtattgataaagatttcatgtgctttttcaataacttcattacgagtcatattgttttcctcagaatattttacgaattaaagctaacagtggcagtcctgcaatagctactacccagaacacagcaaagataggccagaatgttacaatccatgctatctcagtgtcttcagtgacgtcatcatagatgccagtccaaccggatgtagcgatgaacaacttcgtcatcaggattcctatcataacatagcagaatacacaaagtaaaccaaataaaatttccattcttttttcaccgagtatagagtgtaatggaatcatccatgaaaccattataccgacatttattttaaagcaaaacgactgttgtcaatgatacgaagttgggcccgtttgtaggtgtaaatgccttctttaatctgagcattagacactttaagatggtcattgtaccacttgttcaggtcttggtgcttcttgaacactgtctgaagcttattattagcttcaataagagcagcttgtaaatcatcgaagtatttttcaattacttcacgcttaacagagccgtcgtaattagtagaacataaaacactggtatggcgccagagctccctgaggtcgcctaggacgtttttgtctttaccccaattaaacttatacagttcttcacaaatggcctcagcctgcttctcttgctttcctttaggcattccggcgtagatatatgccggagggtataaagcagtgttttcgatccaattagataaaataatcatttgcgcttgtccatgaaacgatagatgccgccgaacgggaatgttacgattttaatgagtgattcaaaaatacccaaaataacaggagcaggccaaagagctatcactatcttgaaatcatgctctgtatcagtcattgtgtgaccacgtaacttcatgcagcaggcaacaatattaccgataacaaggtagccaatgaaggctaccagaacccatactactatttccatcagattttcaccttagttggtcgtttgaagaatgcgtgagttttatcatcacgggcctgttcgaatgtagcactgaattcgatttcaccacgatggtccagtggtacacatttcggcaatgttccgtagacagtagatttgttttctaacactatagtcatcttagaaacaataccttagtaatcttcgaaggtcttaacagatacaacacgtccttttactacctgtttgcccacaggagcttcgcctttgtcttgtttcatactctcgaataggttattaaaccattcattagagtatgcctggatcgctttcaggatgtcctggtgggctcgtactttaaccattagaacttcagtattcgtctgttccatagtccaacgcttataaggagtctggaactgaataccgtagatcccgaagatctcgtcgtacatttcttgtgttaaacgaagcttccaccatccgtggtcacctgtgtactcaggtttatccatgttatcaaattcagacacatacgggagataactcccggcatgataagcttctacttcacctagttcgttttcccacaggtatccatcgaacggtgcatgtgggcggtcatcaactccccaagtaggtgcaacgactttatcgaatccgtcacgtccgaagcgggacttgcaccacccagcattcaactcctcggcgcgtttttcaactttcgctcggtgtgcttggcgggctttacgattttcttcaataatgttcattacgatttcgtttaacatttttgcatctccgtgttggtgtaagatgatagtatcaccatcctacaccgttgtaaactactttgttagacaccgtaagaaaattagcggtctccggtgaaccaaacggatttatgcgcgttaagctgtttttcgttcatcttggctttaatctctgcatccagctgagataaagcttctttaaagtccttagcggcctgaagttggtcgtggtccataacaatcagatgaattgctttagatttcaagatgcttcgctttttgaagcccactgcaccgctagggaacatccctacataacggtaagccaggtttacagcctgtgcatacttgatcgcggccttaatcatatcagatgcaaaagcatcgcggattttaagatattttcttacgtaactcatttgtagaactccaacactaagtactatgatttcctttccatgatgtagcaataagggtcgtcgatgtccatacgaagccagaatacacccagttgaatatttccaggatccgaggtcttagagccggtgcaacgaccacggtctcgacgagaatatcgatgatggccattttcgtccatcacagtttcatagccagtacgcttttctttaacgtcaaggtctttgaactcaacgattttaactttcttaccttctagagtttcataggtatggcctacttcgaagtaagaatgctggccgccagagaccataacgatgacatcttcaacgttctgttctgggaaagataccccatttgtctggccatgctggaatacagcttggtattcgttttcggcgctgatagaaactttacggaacttaccgtcccatacaccatcaacgaaacgtttgaacttaatttcatacacgtataatttcataagttcctcacataaaggtaaagtctgattcctggagtgtgtagcaacgccctgtggctttttcaagaaaagtgtaatacattacaccttctacctcacgttgatcctggagctcacctataatcttattagggccaaagcaccacataatagctttcatattcacctctttgtttgtgtagatctctatagtatcatgacctacgaggatgtaaacacctaaacgaaaaaaggctcccgaaggagccttactttttatttgaaaggtcgaggacctttcggtaggtgctttttgatttgacgttcggccaaattaatcggaatagaaattagccaaccaatagcgtggtagaagccagaccagataacaataggaagccagaacagaacgtacgtccaccaccctaaagaagattcgatgtagtcattagcaaccatcttattagcgacgatggacccaattacaaggtatacaacagcaatcacaataggcatagcaatccaaaataaactcataatatttcctcttgtgtggtagaagtctatactaccacacgttaaaacactgtaaactaccgataataagcccggtggttttcaagataaactttctctacgaagtcgttccagaaagtcatgtccactttatcacgcattccgttcttatgagcaagtgctgctaagcgttcaacttggtcaacagtgtcttccagtagttcttgaacgtatttgaacggcaacttaccagctttgatttctttaatcaaatctgctgatgataatgggaacaccaaatcgccggtgtggtaaatttcacgtagctgggcacccgcacgatatgcgtggctcaaagctttccagtcaacaccttcgttagcttctgctttgcgggcccgttcaccgtattcggcttcaagcttagtcagactatacttgatttcagcaatagtgattgtatcttgaaacttacgacccagaacgttatagaaccgttgaacacccattttagagtcaacatcatctttccagaacaagaactctgacgtaggcagaaggtgtttaatttcgcctaatttccagcgctggttatgggctttatctttaggccgatcggcatatttccattctggatattggttcagaacttctagtacgcgtttcagttcagctaaccgagaaccctttacaccatacttagcggcttgcttacggacgtaccctagatatgacttcatgtctgtagtatagaaccgagaacggttctcttggatgaatttccagacatcaggcaaatcagatttaacaaccagacctggaggagtgtgcagcatatcaagtgctacagtttctccggactgggccagttcaaagaagtatttcaggctataaagctcatgatcgacatcatcacgagtgttcttagtagccgtgttgttagtgttcatattaaagtgattcggcgctcgtcccattagaatatcacgagggtgcggaacgaagatttctttgaaatcgacatcactttccggagtagaggtcccataaagatgagacccgaagtaagcttttacgactgttttcaatctggtgtaccccaacgaagaccacggaatttttcaatcatacacttgtcactaaagttaatctgcagaccgccgccatccggcgtgcttgcaaacatcgtttggccattagaactaatcgccaagatttcaaacgtgtcgccggatttaacgaatgaatcacccacttcaaccgggacccagacgtattgctcaccgccacggttatagctaaggtctttaaggttaacctgttcacggaagttacgagccgtgcgatggatacattttacacgatggcaagaaactttcgtttctgtgaaaattgcaacttcacagtatccagtattacttcctttaactagataccgagcgcccgattcggccaggaaaatattataagtaccgtggttgttaaaagagataaagtcaacattacattcgattttatagccgtcttcagtaagaatctcaagagaatcttggcgggccaaagtatctttcagttggactttagatttaacctgtttaataaacatattagcctcgtttaccttggtgccattggccgtcgaaataaatgtctaaatcgaatggcttatcgttttcaacatactgctcggaagagatagtattatagattactttaagcacctcgccggtatctttaaagacaaatacagcggcaggaaaatagaacatagcgtttttaactacagaggcgttaaaaacggcctctcggccgtttactatataagtttgatcgtttttcatttgaactcgataaaatgacaagttttgtctttaaatgatttatatgcagtcttaataaaacccggcttaggtttaacatacgtgccgtttgcacgggcttcatattcttcggcttctttacgagatctacgcttttcgtaaagataccagatacaatagacaggactaccgataagtccaagaattaacgcaatcgccatcagaccggttaatattgccggcagaagcataaacccggccgagctaataccgagcgcagcgaaaatacttacacctgtagaaccgaaccatagaagtaagcatgcagctaaagcaataaacactagaagaagccagaggacttgacgaatatatccacagagatctcgcttaggagaatctagcagataagtgaccattttgcagtgccaagagtcgcgtttgataatcatttttatttgtccatagttggaataacagagttcagataagcaacaagtgcctgtgcttcagctttagtaaaggtgacccagttaagttcatcttccttttcatcatactgcttcacatgaacaacatcacactgaatctctgaaaaattagaagtaggaaataccgacagctctgtgtcagcttcgcctggaaaatcagattcaattttagctgctgaagatgatgacgggtactgccactttaataaactcattttgttttcctcgtttgtttgtgtaagaatactataccatactatctgtttgtaaattctctgctgtacgcatcattacttcagcccatgaggctgcattacttttgcgaacgatgcgaacactagccggttggctatcagtatctttaacaaatcgttcttgatgatatttcaagatagcttcagggtgatataccatgtacattaaacttcctgtagcaccgcggtactggcagatttctacagattcaccaccagtgtaagtgcgagttaaaatcaaatccccaacttcaagtttaccgatgctcatctcatgctcctgtgccagcagttgcgtggctcacgtttaaaaatttcatcgttcatctcttgacaacggatacagtatatcacacctttaatagcttgacgacgtgcttcaggaataggttcttcacactcaaaacaccgataaagcgattcgcgttcagtattaaactgagaacgtgcatgaactactgcagcctgtacaacagcagcgatttcgtcttgctcagcaccgtctttagcaaacccaacagccattataaccccttaagtattcgaaaagttctttgaatttggttaaagcctttctacaatttcgttaacacgtttctgaagtttttccatacgagctttatgctctaaagccggaaacgtaggagtaactgcagcaccaaacagaacagaagcttctttaagctcgaagatagctttaattagttctgcttttacagaggaatttaccgtattcatttcgccgtacttacggaatgtgtcaatcatatgttctcctcgtgttgtgtaaggatatactaccacgttcttacaccgttgtaaaccccctaaagggaccaaaaaggtccccttaagatttaatctaatgaaagcaagtacttagtttgatagcaaagagcattaatctcatcaatgatgtttttaatagctccaggcatagtttcatagatgcgctctgattcacttatgatgtgatcgagcatctttattgtatcaggtgggagatctttttgagaagggatggcaggagagtatttctttccagaaaaccctagccaagtttctccaaaagaatcggttaaagccggaatcttgctaaaaaagttatcgtatgccttatgactcgagtaacttttggtttcaaaatgcgccgaatgaaaatacgacgcagaagccattaaaagacctaaataattatccgcctcattaggtttaccggctgttacaaactcattgaacttcatggtctaatggtatcctcatttgagatgcatactgtagtccggcattgatgccagtaacagaacattcacttgtacaatttacagttgaccacttgtttttaataaagctatagaactgctctgactcttgtttacttggtttttggaactgggcgtaaacctttaaagcgccttcaacgtattgattaaattcttctgttcctgtcgctacgacaggaagactaatgcaaacgcctaaggcgagacaaagtgagtgtttaaaggccataaggcctcctatttttgaccagtattacgtttatgctgtaaaacagccttaactgcatcgaggtatctttcgtgagaacgcatacgcttatagtccgcttcagaatcagtttctttgtaagaaatacgaagtgctgaaatagcgtgtccaacctcaactcgaatttcatctaattgagaagtagtcaaattgcggagctgcttatgtgacaaatgcttcatatacacctcttgagttagtttacaaacgtatttatcagctaaaaattaccttgcatttacatttaggacattccggctctttatttttaagacgcttagtcgcagttctaggcgccttattatagtcatagacgtgtagacaacgatagcatatcacccatttcatactattttccagtcactaattcgaaccaatgcttacgacaaagagaaacataccggtcttcgccgcctaattcaatcttatcaccttctaatacagcattaccttcttcatcaatacgcgcgaccattgttgctttgcggccacagtggcagacgcctttcagttctactaacttatcagcaactgctaataatgtttctgaaccttcaaataagataccttggaaatctgtacggagcccatatgccatcacaggaacattgtattggtcgacaattttacacagttctatcacgtggtgtctagttaagaactgggcttcatcgacaaatacacagtgtatatcacgctgtgtctgagcccatttaaagaattcgaatatatccatatcaggagtaatgatattcgcttcttgtctaagcccgagtctggatacaacttcagtagatgaatcacggccatcaacagaaggcttaagaatcaatgtacccataccacgttctttgtagttatgagcggatattaataagtgtgctgattttccagcgttcattgttgcaaaatgaaaaattaagcttgccattatttaccgtcccaatctactacgatgatattagtatgatcagtgaacatattaataatcgtttctattttagcccaatcaccgccggcgataccagctccaatccgaggaatataaactgtcagaggagtgatctgattttcagatatcatatcaagacgtctgaaagcgttcaacaaagcaccgtaatctagattccgaccaggattatattgagtatacaagttgaagcaataagctgttccttcgggccggctatttgttgctatagtaataaaaccaagcttttctcgatcgccaagtttagtttcgcggatatcggcttctaatacttgcgggaaggctttagcaagctgtccagctataccagcgcccatttggtgatggcaattacaaccatgcgcgatatgatgtcctgttttaaacagttctacgatattgccggggatgtattgggttatcatttagagtttaaacctctattatatgagtcgactaaacggtcaaccatagattcacatatttctttatacttaacatcagaaggaatacactctgtggtaagcaatctattttcataacgatctgaaagagaactttcacggaaacgagatctcgaatccatttgaccgtctttaaaggccataatgacttgattagagaactctgttatacattgaacgttttttggcgaacagtagtctttagctgtcctatgtgcatattcaaggattctggatttatcggtactttgtgccgcattaactcccaaacataaaaataacccaagagctaaagataattttttcatatcttatccactaattagaatctcatgcgatttaagataattcgccttttctataacttgggaggcgtacttattacctgcctttacattccaacccgcattataactagagatagctttacgcatgtccccgttatgtatatttaaccaatagctcagctcaatatacgcccagcgggcagaatgcttgcggtctgataacattcttttgatttctgtatcagaaaggttccagttattttgtgcagctctattacggaccgtaggcaagtaattttgaaacactccataagcatggtgcttctttttgttcttgccggtattagcgcctgcacttgactcttgccaagctatggcggccataatgtatccaagtcctttcttatcacgcgtttcgtgagttttatacttaccgtccttagtgaattgctccccgaattgatatgcgtaatgcaaattatcgagttggacattactgaagtggggctcagcactaaaaacagacgcagaaagcatcgtaagtgccaggatcgcttttttcatgttttcctcttaaagattaataacgtatgtgctgattttaccttttaaacgtttattgttaacgaaagccatacggcatttcaaggaataccaccggcctgggatatggttatccacagtcatacccaaccataaagttccatcagtgacttcaaggcgctgtggacggtatactacattgggatctatatcagcagtatcgattggtaatggtggtaatttcaagaattctgagatctcttcgacgtgaagatggacctttttgaagagagcgaatacatactcttcatctatatcacgttggatagcacggtccaacagatgattagagtatttaataaagaaaggttgaactccggccttaatagccgcggacttcacagaagaattgatatctttgaaagtggtttcaaagatacgacggagcttattacgccgaatgaaaacgcttggatcgatgttagtcattttaatttcctctcattttggtgtagaagtactataccatactcctacacacttgtaaactagtacttttcttcaggccggaataccgctcggcaagcccacatagaagcttctttaagacgatctttagcaagcacgatagcatttaatgcttggatatcggcattaaaatcttcatcgctttggtctgggacatgttcacgcagttcgtcttcgatggctgagaagatcagtccaagtcggacttcagcatctttgatggcattaacacggttaatcttttcggcggtgtgtggtttgtaacctttgatgtcttcaacggccataaggaatttcctcatctgtttctttgtcatattcgactaactcgatttctgacgagtagccacgggtaccaaggtatgaagttgcttcttcatacttcatggtttctgggttccagtcgctagcccaggcttccataagcccttgctcaccgctgttactgaaccaatcacaaaaggctttaatagccttatctgaacctttaataataacctgggccatgttaaccagaggttgtatagcggatggaaatatctaatttgatgggttctttaaacaattcgacggctcgaataagtttgcggtcatagcaaatcagactgtgtgataccaggccaaaaagaggcccagtaacaaatatgatttcaatatctggcttagaattcagctcttcaatagtcgcttctgtctgaataacagactgtttaaaaggaccatccataaacatataacgagccattactgaatccccaaaacgaaaaataaaggtaacttaggcttatttacagagtaacaagcagaaaggtcgtcccaagcttcgtagaacttgtacatctctggaatgcgaataggctcttcgattataaacaaagttcgcttaagcgaaacacctcggaacttatcttttccactgaggaaactgcgtacagtatcatgcattagtatgccattttctttatcgatgctttctaaaactttccagcgtcgtttaatacggtcgcaagtatctcgggcgtattcgcttttgtttgcaatgacaataacagaattaccttctgagagccagtctgcagcaaattgagagaccgcttcagttttacctgtttgacggccgccgtcaagtcgtagtgttccatattcttgaagcatggcaatagggtactgccatgaattttctgggttatctaaacgactgattgcatggtctgcaaaagcatgcatcagagatagatattgggctgttaagtatttcatattatttccaaagttgtgggccagtccttggctctaggtggtccatatagtatttctaataagttaagacgataatacttaaacgtattttcggccacctttaagggtgttcattcatactttggcttgagggccgtcatggcttaaatcgcataagcccgcattacaccccaagactttttaattttagccaaagaacctttagatacagtaataaaaaaatcataagcgcctttggtccattcaactgaatctacttgcacgccttccttacgcatatttgacacaatagcatctacgaattctttatccaaatttccttgggtacagatccggtattcttttggctctttttgagtttttgcttcagtgataaattctttataagttttcattttatatcctaggatagtaagttttaaattaaatggggccattccttggcacatgtttaatccatcgatacactatgtaaaccccttaccgcacttgggctcgaccttattacaggtaggaaaaagctacttcactcagaggactcgacgttcatgaggagaggtcgtgtttagctttattaggaattagttttaattacgggctgcattagcaacggcgtaagcgtactgaatattagcgtctttaaacgtacctttagtggtatctagatctgccttaaatccgcctttagccataacctcggcgaattctttacggaaagccaatgcatcaagatttttccaggctgccttatgcttagcgaattcaagaccggcgaagttgacagccttagccaatttattgtcaataacccatttaccagctttaggcacaaacaccgggcctttctgtttggagaacaattttaaattccagcggcgaaggtctgcatcggctttaacaaaagctgcgtccaagttactagcaacaatatcttgaatatgggcaaatttaagtccgtcagcttcaatatttagatcgttacgccagcgaagtccttcccaggcgaaggctttaaagtcagaagcctttgtagctaggtatcgttcaataggagctgttttagggtcaaagccgtttcctcggtaggtccactcatctttattaatgccagtgacctttcctgcataagcttcagcgataaattctttgtatgttttcattttatatcctttaagttgatagaagcattctatcaaagcttatcttagttgtaaatagccttaccataatatttataccactgaggcctttgtgcaattttttcatccaaacgagcctgacttaaagcgatgtcagcttcagatggagtaaaatcgttcattaaacatagcgggatatccgatacgttgacatgggtattttgaatctggaacccacgctttaaaagttcctcaataatagcattttgccgcgagaacaaaaagccaattttatcgtagaagaacttaacatgacctgcgccgaggcggaagtctttaggaatatcgctgaagccttgtcctttagccaaacgatcacgaacagcaccgaagatgcgtggcagttcacgatactcagccatcaggtgttgatcagcgagttcagaaacaagagttaagttaatacgtgtcatagtagcctccattaagtttgtaaggctactatatcacagttatcgtggaagtaaactactatttacctttaattgctttaattgctttagctgcttcgatagccgcttgctgaaggtcgtccatagacataccgaacttagaagcaaagttatcaattttcttttcgacagcattcaaaggcttggcctgtttaccttcattagcgccagggagagcgagaatacgctctttctcaatataaaggcttataagtttcttacggtctttatcggacaaatcatgaaatgaatgggcctttttatttatagcggcttctaatttacctgcacctactcgtgcttcggcgataaattctttataggttttcattttataccctttaagttaatacgtgtatagtagcctccattaagtttgtaaggctactatatcatagttactagaagtaaaactttatttataggttttcatccagttcttgaacaaggtcacaacatctttctctttaacatttagtttaacatctagcattttaccgccggcagcacgagtctggcggattttggctgtgccggtgtcaccgttccactcgacgtagtattgcccagtgttcattgcgataccatcgccaaaatcttcgttcttagaagtagtaaaagccagcttcattgtcttggcgacccgggcctgcataccggtttgaagtgcattacgaacacggatgacttgaggagtagctgtagtcaggttttcgttcagttcttcggttgattcttcttctaacattgcaagaagttcagcagaagccggtacattagcctcggcgataaattctttataggttttcatatgctttccaagttcctgttttaaatgttgcgataacgcgttttgctctgttaggagtctgattataccatcgggatttggctaaattaactgctgcatcatcccaacgtttctctttaagcatacgcaaagaattggtgaaccctgcgacgccggtaacgcccatttggaagaccatattaattaatgctgctttacgtacggcatcaagagattcatacacaggcctcagaactgggttgcctaagataccacgagtggctttgtctactgaattcaagaacaatttctctgcttcagcacgagtgataacgccattacacttacggccgattaatttatcaagctcagctttagcaacattaatatctgggctcttggttaagagctggccgataccgatagtatagtacccttcggtgtctttataaattttgttgtcgtacccttcatcgatacgaagcatgtcaaaaatgtccataggacctcctatctattgataggagtatttatcacgctacgctaggatacaacttctgcataatacggtaaagagacggccccattacatgtttccacatctcaggtttaatgcatgcgaatgcatccatttcaggaatagaagacccatcttcaaacgtgtgataagcagtgcatttgcaattcctgaagctctcggtgtccacgaaacgcatataactaaacagatgaatattcttattccgggcatattcgtgctcgcctaggtcatacagggcttcaggattaaagtctgtgaatccagtttcttcttggcattcacggattgctgcttctttaggagattcgcctggttctacgtgacctttaggaatgtcccatcgagaacttccgtctttacgcttaatgccggtcatacgacccatgaacagacgatggtctttagtaaagaacataatcccagcgcttaattctttcattcaaaataatccttcacgttaaattcgccattataaaggccgtagtgaatagccttcagcacatcatacatatcatagtacttttcacgtttcagagtaccataatacttttctttaatggtatcccattcaccgagtttaccacttgctaattgaccaggttgaatgccgagttcaatgaactttaggactttaaatccaacttcttgatgcgaaggaggaacccatccccagttaaagtagattcgacctgtttcctggccatctttaaatgaaatcaaataagttggagcactcattttctgcatcctttgacccagttcataaagttacgttcttcaacatatttcttgtattttttcgcgtatatcttatcaagaataagtgtgaaaagatgtacaagaatagcagccactagtggaaatactaaaatactgatcgctgtaacaaatacccatacaagcggaattgggctaaataggctataaaggcctagtgctccaaggttaataaaaacaagaacaaaaccaatcttaaatcctgcctcgtcatcatcaatccaagtacgtgggcgacggctactcatagcattcattttctgcatcctttaatccagtttgcgaactcagcgtctttagcttgctgctgcttaagtttgtcatgcttagtttttctgaatccggcgatggttccggcaataccacaccctatagcgccaccaatcagcaacccactaagggtacccataacactcactaaaacagaaagcaaaaccagttccagtgctgtaaaaacagtccaattacaatagagaaataaagatacacttaaaaacggcccgataaaactaccgactttagagcaattatctacaaaggtctgaggatattctacattgtattctttatattcggccatttctttcaagactccagccattcttgggtcaatatgacggacgccgatagcgtccttatcatactcgttacgatagattgtcattaccaaccttccatagggaactcaagataaacctgagcattcactcggatttcgttcgtaattttcttaacgcggtcagtattgcgggagactcgtccgaaccagcgccagccgttaagaaccgctttagaaccagtgtgccaggtatcatggttgaattgaagaagtgtacggtccggagcttcccattgcttaagtgtaccttcttcgatgtgacgtaagacttctgggtgccagtgtttgtagaccgtagcaccttcaggaacttcagaaaactcagccacaccagtagcaaaatgagtgggacaaatatcggcattagcaagaccaataatatgctcggcatgatagcgagggttgtcataatcaggttgacctgcagttaagaaatgttgaccggtcggaatatcaggacgtggtacgtcatcatgatgataacccgggatagcaggataccagccaggcatcagcatatggatgcgagtatcgataaccacttcatcataacgccaatctacaggaagattatcgatgaagctacgagtgataggaccgccgtgtttccaggcaaaggctaaatcacagttaaagaacattgtttcatttttgatcacttcgttagagatacccatagcgaaacgacctacgtcttgcgcctgtgaattaaaagtttttgggccattcataatattttcctctcagtttgtgtaagagtatagtaacacgttcctacagctgtgtaaacacttatcgcaaatcttttgcaaaattcaatgcaagttcacgttcccgaatggcaagttcacgttctttgagctctagctctttcttacgtgtcttgcggtcttccttatcaagccttatgcctttactagtcattttaccgctagattccagtttaaggtgatgacaccaacgtagtatccagtaaacaacggtgcatgctactacacagaggctaataaaccagatctgtggcaacaataatgccgtaaaaataataagcccgttaaacgttaaaacaccaaatcctactgaagtaatcgccataactaaaagatataaaaagaacttctcctgtttataaagattcccgctattggtccagtacaaatataatgctttagtaatcatcttgggttctgccatgtaattttatcggcttgacaatagcgaacatgctctacaaagtagttgttgctactgtacttgattctaatgacctgtccacatttaggacaggtcttttctgtaaacggtttaggcttcatttttgaatggcttaaccatatgtttgtttttgtggaaacgatcaatgtaatcattcacgcctagagttttgtacatgtggactactttatggtagttttcccaagcgtattcacggaaccagcctgaagtaatagatgtacatactttctcaagggccatcataaagctatgctcagaacttacattccgaaagttattcgggatctgggaacgctctagagccaagacgcaggtttcttcgtaaacaccagccagtttaatagcttcaggcagtgcttcgaacttctcgcgagaagtcatgacttcagagccatctttcatgtagaaagtataagcaggacggtctgccagagctacagcgcggtggatgctgtcgtggtcaaacgtgtaaatggtatcattaaagaacgtcgatttattcacatccagtttaggatggctgtagttcaacgtttctttctggcgaaggagcataatctcttccataaccggagagagtttaacccctttattacgcaagaagcgaatatgatgcatcgttttacggaagaatgggttattctttttgaaacgatgactcattttgatggccaaacacatctctggagtagcccagtggaatccagagatgttatcctttgcgaggaattcttcagaatagcgcaagagctcaaaatttgaagtaaaatcttcaggaagaagtttattaacttcttgacgaatccgagtaatagcaggaacgatatatgcttcaaagtgggtttcacgcccgttatgcatacatttaaatgcgcgcacttcaggattattgactgctacttcaatgcctaacatctgagccttaaaagcattccaagaaccttggtcggcgatgaagtcccaatctgagtttttaatatcgtcataagagatcaggccgtggtgttctagagcgcgagaaccgataactaacatcataatattttcctcagttgatttataggagcattatactgatttttaagacggttgtaaactcttttacggcataaaactaaaaacatttcatgctctgaaggaggctctttccatcgttgttcttcaaagtcgtagattagaaaaggaagagatgtaccacgccgtataggatactggtcatacatatcatatagtagtttacgacctatagacatatgttctaaggctcttgaaatctctcccgcccaattgaacagattcagacataggttgtggtgcttatctctttcccaccaatggatgtacccgttcttatggaacggggtttgagtttcgatacagtaatcaacagtcaagtgagctactctgccagccaaggattgaaatattattgtagcctacttgaacagcgctatgaatgttcaggccactgcggtcgtcgaagtagatatcgacattttcattttcttctgcacaaagctggaacagattttccagagcagctttggcagtgcgtacagcacaatctaattcacgagacatgtttacctctgcaatatttgatgaagcggttaatttcagcttcagtgatttgttggttttctgctatgatccattcaccgtcaatgaatttagcatcaggataagtgaatccatctaattcttggataagcttttcataaagatatgctgctgcttttaccttttcacgaacagtgtactgggtgtacagcatatgcaaatacgccacagaacaagtgctttcgaagccatgttcattttggtagtgtagataacaatctttaacgaaaatactcataactcctcctgtaagggccactataacatgacccttagtgaatgtaaactagcagttctgcatagagctggaataccagaagcctttatcgtgaggcagatagttatcttcacgaatccatttgtagctttcccattcttcagaggttgtagggatatactcttcattgccagcgcagaaatgctcgccagttgcttctgccatggcttcaccttcagagatcagtttagaaatggcttgttcgacatctctgactgttccaagcttaaattctgctttaatcattttatttccttaacaagagctaggatgccaaatacggccatccgcttctacgttaaattcacgaccagcttcttcaccgtagcaagagctattcagccaatcttcgaaacgaatagaaccgtcgtaggtgtcaaattcaataccaaagttctgttcactagccattttagaaactttgttatacagaatagccagttcttttgctgcggcttctaattcggttatagtactcattttaacattccatagatgaagagacccaaccacctgtttcaaggctcgtgtagtactcgtgttgattaacggtagcccatgaaggattaccttgttcagtgtactgctcaagttctttcttcaagaaccctggtgaataatacgtaccgcccataccgtaggcaggtctaatagaaaattcagtattatagcggtctgctacaactttagcatgtcgaattgcctcattaatagcttcaaccgctttagccatttcttctttagggtttcgtttcattagcacatatcgctggatgatacccaagcgccttcaaccgtattaccattttcatcaaggtctacatcatagcaccggcagtagtatccaagaccgtagtcttcagcattagtgccttttgggtaataagtacgaccgttcccataatcgcctgttctaaatgatacacccattttatcagcgatggcttctgcttcagcttcgatatgatcggtcaggcccatgagtgcttcgatagctgctagtgctgacttacaatcattgtattcaggaacttctacttcaaaagtatatttgctcattttctgatctctttcaagaaagctaatgtttcatctctggaatcaagaaggcgctgttctgcattttctttttcccactcttttacttcttttcggtaattatacatgtgttttaatttagcacagccgttaatgacatacggtatagccataatagggaatccaaaagaaaacccagttactatcatgatcaaaattgatagtacagatatctcggcacccatttcgttaatcatgaatgccggataaaataccatagcgcacagacctatagtaagtcctgccagtataaacaagaacttgtctgtaattaccttggtataaccccagtcaataggtttattgcgatagtatctagccatttactgcctcacgacaatgtttgatgaactcttctacaacgatctgctttgctagctcagggttctggctgaactcatagatctctggcgacagcacggttctaagataagtacgccgttcactatagtacccttgaccaggcatattagtataattaggattgcaaagtaaagaaaccgtgtaaattttaccttcaatcataaactctaggacaaaagcaaaaaggtcctcacttttagttaaaaactttgccttatctcttgcataagagagccaatgctcattatcatcattgtacgcgtagatgctgtactcaagttggtagataccttcaatacgagcaccgttatagcgccggctgaattctagcacgatttctttgataaacttagtattggccagcataatagcaggcggataccttttgttgttgtgactgccacgagtctgcaaaaaattattttcagagcaacgatcttgcatatacggcatcaaaagctcgatagctttttctgggatacctttttcacgcagtgcttcaatttgtaatcttttagacatagtattatcctctgttatcccaacgagagggccgaagccctctctttatattacttcagagaagccaggtattcctgaacatctgcagttgtggtggtagtaccaggttcagcgccgttaaaggtttcgaccttcatagtgatatcgtccacagatactttagccagagaagccagttcgatcacatcgtcggcagtgctaataccaagatcagcggcggaacgagtttcacgaatgtattctagcttaacagccagatccagacgtgcgtcgtccagctcaactactttacgttcgatctcttcacgcatagctgcatagccggctgctttttcacgtagggccgcagcagttcgacgatacagaagacccaatttagcgtgggtttccacattcatgttttcggctagcaggcgacgaatttctttttctttagattcggccagtttgtctttttcgatagccagagccaagatacgtttctcttcgttaacagatttaacatgagaaacacgaagctgagtgattttgtcaatcaggatgttcgctgcttcagtgtactggtcttcgatggtagtatttttagcaacgaaggtacccagtttagcacggatgaatgcaaccagttttttcagaatagccattgtattttcctttcagtgtgtaaaaaattaaattatcccgtttgtgtaggagatcataacacgtctcctacacattgtaaactacttgtatgtttcgataacttcttccatgaaatctaatacggtggtttcaataatgcgagacagagccggatcgccgccataagtttgcatagtagacaaaatgatattttccattgcacgtaaagctgataagcgttcttcgcctgtcgggaagttaggagtttcaccgaacagtcgagcaaaagaactaaaatatgtttgggctgcagctttagctttatcagggtaatgcattatgttttcctcagattttagttttaacaaaagctacataagcggcagcttttttaccggcaattttcttctgacgtttagtaccgataacattcattttaacagtaggagagtcggtttcaacatcccacacgtgaatgtaggttttagcttcttcacaaaagaacatagcgtgagaagagatagtaccaaaagctttagtgaaatggaacattttattctccagtaagtctgtatcgttttgatgagtctataataacacagcctacagagaagtaaacactttatttcacgtttttgtagataaattcttcaagagcttccgttattgcttcatctacgtaaacatcaaacagagcatcgctgtacccgtcttcatcttcccaagaagcagcaccagcacggaagccttccatacatgctttccaggcgctttggtataatggttctgaacagtttcttacaatcaggtcagcgtattgcaggacccaagaagctggtagaaattcagttacttcattaaactctataaaatcttgactctcgaagagagatgccgggtatccggcagtaatattacgtctcatgatttcaccttgataaattcaattcgatcgatttcgtcccagttcactttaatacttccaattaactgggcgcgttcttcttcacgtgcagtccagtttgcacaagcaaagtatctagaaccatcttctaattgaccaatcaccgcctcagagtgaccaccttctttccagtgaatcaaacagcaccctaacgggatttcacgttcagaatcagtttcgaaagttttggtaattttcattctacttcctcagagtcagcccagaattcgtcatcagtatacgtctcatcgttatcagcaataaagaagcctttagaagaatcaacagtatctacagcattatagatgtttgattctgagattcgaatcagctgctgcccgttaggtaatacaaatgtctcgccatctttaagatctttaaaaagtttcacactcgatcctcatttgttggtgtacaagcatactaacacgttcctttgggcgtgtaaaccccctaatggggacctcggtccccatatattattttactgctgcagcatttttagccaggttcttgatagagaacaggcgagagtccacaagcttaacaatatcagcaacatacccaacgttttcaacagatacatacaaagcgtaaagttccggatcgtctaagttattaatctgtcggccgttacgaattttagcgaaatctttcttaatctgacccgattcgcgttggatatcactaagcaagcttagaatctgattgtatttcttggtaatgtttgaagtatcgaatttaacatcgggtttaacaggttctttaacaggcttttgcgcttcaacaggttttgtcgtaggagtaggtttaggtgcttcaactttagtccctgaggctttaggaggagctacctttttctgcccggttaaagctttaaatgcggcctgaaccttagcgtaatctttcggcgtattagtactgatgccgtagatcttttctacagaagcggcaaacttcataaaatcgtttcgttgatctctaggaattatatccatggcggcttgccatttagctttggtcatgcgtccgctagattctgcgagaatatctttaaattttaacatcagtggttccttattaagttgtttatcctatttatgcccgaaagggagaccgaagcctccctttcttctcggctctgatgacttggatgcacccagaggtcattcgccagccttacgtcttcgagtgcaattctaggacgtcattctttattctgcgatgtaaagtttaatttggtgccgattgcaggagtcgaacccgcggcatcttcattacaagtgaagcgctctaccatctgagctaaatcggcataagacgggaaataaggattcgaaccttatatagttgcacagacgtatctgccgttgaattcctcactaagtttaagcaactattcccaggtcttaatttggtgcatcgagagggattcgaaccctcaatcctttcggcgggagattttaagtctcctgtgtattccagttccaccatcaatgcgaaatggtccacgcagaaggattcgaaccttcgacccacggcttagaaggccgttgcttctatccactgagctatgcgcggaatattattcaggcaggacttgaacctgcacgcctggtcagcaccggtttccgccttactcacccgagtaccaatcggggtttcaatcaagctattccggtcgtgtctaccgatttcaccactgaacgtttaataagtttatttagtatactctataaaagctaaagcaaaatgtggatcgactttaacaattttatgagataccttgaatcgatacggataagaatccacaccgataccgtgtcctgttttgcctgttactttgccaacacgcatttcaccatcttgacccataccagaggtttttacgccaaataagatatagtcgccttcaaaaactggaacaccgtgtcggtctttcattaattctatcatttttcacctttaagcatttcacgtacacggtaaaggttactacagaattcttgctcagttagaaccgtttcgttctttttagaacgtcccatagagtgggttaatgtagcgttctgtgtagccaggagagctctcttgaatccttcattagtagccaattgatcatatgcccgttcaataagaagcttataggcctcactctggcgttgcatagggacgcctttccagtacagagtttgtgtacgccaccacttcttctttttacctttgaacttagccgctttaccgactaatgtacaaacgtgtgcagccatttcaggagagctgaacttcaacgactgtaagaagccttccattgaagcacatttaacaccgtcaatttcaaaagcatgtggagcaaagttgcttaaagcacaacttggataacttgaccctgaaccaatatccattagatatcctctacgtgaatcatgattgtgcgtcgacgaacaacgcatcctttaagttcttcagcggcttcaattagtacacggcctgacggaagaataagcccgtcaattcgctgttgggcccgtgctatatcgataaagccgtcggcatcaaggatatctgtgaattcccacccaacccagtattcgttgttaacgtacttggcatatgagccgaattctggattaaaaattacgtaatcttgttgcatctgttgttccaaattttagttagacctgcatgctcgaaggcacgcatacaagaaagaccgactttaccgtgttcttcccactcaataactctatcattatctctgaaagcaagacctttagctggttcagcgtaaggcttcaattcttcaggaacttcttccatagaatcataaacgacagtaacagctcctttacaaccggcaatgccaacaccgcatttgcattctaacacgcaacaactataactgatatacgtaaaagggaatttttcgccacagaacgggcaaggaagtaaatcttcatttaggatagtcataatatttttctcagtagatgattggacggaacgcctgggctcgaaccaggttatagaacaattggcgttgaactacatttttataaggccagtaaatcgtttcctcaacaggcacgccgccaaacgtgtcatcctggagaaaagtcaatacgtcctcgaaccgtataccttgaagtgggcagggtctatattggagatcctgaagatatttccaccacttacatttggtgaccctggcaaagattcgaacatgcaaccgatcccttatgaggggagcgctctaccagttgagctacagggcctgaatccgggtctaaagagtacaaacaagcaggttattgtagaacacatagcacgctatgcgggaacagcgccttcgtcctcggcattatcttataggactctaactcatctctttagactgccatgtaattatctttcgtagggatacgaatctctcaagctttccggaaagctgaataagcgttaatggctctcatatacccgtgcacagatataatctttgttaacacattaactgaatcgatatacctcgaaagataactaatatctttctgcgccgcttcaagctgtgattatacgaggtttcaatgagggacctgtataacagggaacgtcagttcgacgacttgcgagtgcgcatccatctgggctaggcctcaacaaggtcattaccagattggtctcgcttcttatttggcgggccgtgcaggtatcgaacctgccttgtcctaagacacggattaacagtccgtcgcttcccctctcagccaacgaccctaactggtgggacaccgaagactcgaacttcggacacccggattaaaagtccggtgctctaaccaactgagctagtatcccatttatttggaggcgggtgatggactcgaaccatcgcgtaacgggatatgagcccgtcattctaccaactgaagttaacccgcacctatttcgaaagctctccacccatcacgagggcttcactcgaataatccaggaaggctgtacacttcccaccaaattatcgtgtcaagaactttctgaatagagacctcatattgttttagagcttaagccgcaggcttctcttgaggtcattttgagactgttgtctccatgtagtaataatatcacttaaatcttaaagcatattaccggctgatcataatataatcgtgttcgatgcaactggccatctgttcattcttgaaaatatcatactcaactggagcattgtcttccataacatagaaagtgaagttcacactgttataatgatatttatcaccaaccagctggacctttgtgctcgaacgaccgatagaaatctttttgacttcatgaaacgtctcagcaccaaatggagctacagcaataagtctacgagccagttcagaatcgtggttgtagccgttatcaggatgggttactttagcgaatactttcattaacgataaccactctctacaattgtatgagtattaaggttgacgatgtgccaccagtcaaaacgatctttgaattgtttcttcataagatcgcgcagttcatcgatactctgtgatttagctcgcagatcattatatccaccggatggataataattagacccggcaaataatgcaaagttattaccagtgttcatagaacagccggaagcatctaccaagttaccttgctggtccgtgatttcgataaacgaataacttaagtcacgggcatattctacagcatcttggtatgtttcaaaagaaccacataagatgcggcaattaggccgagtatgcggattagcttcgaaatcaccgtataatttatagttcattggtgtacccgcttgtcacagaacaaaaagaagaactaatgacttcatacttatcgttaaagtctttacgttcacgagcggcttcaatagcttcttcaatagagccgtaacaatctacaaaatcgcctgtcccgccactagggtaatactgagaccacatgaataagccgtacatattttcctcacttagagatttcattcattacgaaagctacaacaatcattgataatgccagtccagctgacaccgcgttttctgtggtagttaacagacctgccataaaacccgcaaacatagaaaccgacgttgctccaagagctactgctactgctacattacgaatgatttctgcacgtttcattttaatctccatcacttttgatttgatagggtcatcttatcacgacccaccagagttgtaaacacttactttaaatgttttttgatttcgctcattttaacaggtttaccgttgatacggaactctttggcaccccatgatttaacatgagacatcagggtttctaggtcttttgcttcacctaggtcaaccatagcgttttcatgagaacctttaatgtgtacagcacggaacagtttatgggtaccgtactgggaatcagtgatgctcagttctacatagttgaaagcatctttagattcatttaaaaattctttgtaagttttcattttttgatttcctgagtaagttggtatgagagtatagtaccataaccatctagtgatgtaaactgcctgaatgcaaaaaaggagaccgaagtctccttattttaaatcatcagcccagtctagttgaagaggttctttgtattcacggtctaaaactacatgacacttgacttcaccttcatagtgagcaggccctatgttgtagcttagggtgatatgcggtgtgtactcaggaaaatcatgtgtagcgcctagagcacgagcatagttatgtcggaactttagataatcagaatccagtttgagaaccaggaccttaccgtcttgggtatcccaagtttcaagttctcctgaagtagcaacctcaaaactcccggtcgagcatacgtaaggtacgtcaactcgagagtagcatatcgttgaatggattttatgacgaggaaccggattaggaatcttcaactcgcgctgaagattctcgatttcatctaaagtcgattcagaaaatttagctgcaacataaaggcctgtagtaaagtttttaaacttcacttagccttctacttcagcttctgcttctgcttcatcttctgcatcgccagccagaacaaccgacttagctgcttctacaatagcggccagttcataagaaccatcttctttagcttttacaggcagaatctgaactagttcacccagaacggcttccagctctttaatgcggtcttgggaagcctggacaacttcagacagatcgaatacgcgtactttcagggcgttaataatatcttgactcattttaataccttatcaatttttttgtagagttcttcaatagaaccgtcgtttgttattacaatatcaccaggcataaccggaaggccacgctcagtgatgtgagaatctgttttagtttcttgagacgggcgaactacatggataattgtagcacccatcgcccgggcaaaagaaatttcatgttcttgacgaacatctggaactacgaagtaattatacttctcaaagttatcagcatattcgtccatacaccatttaacccaatacatcttatcaaagcaattgaccacgatatccgttccaagggcctgcatcagacgtctaacggaccaatcatcttcaatagtatttatgacgcgttcaacttctctttctaccgagttcattggcaggccattgtaagtagaacacagatacttttgctcagacaaccaacccattgctataagcatgatagcaatgactctcttcttatcaaggaacaagttctgctcgcggtcgtaatcgataccttcgatttggtcttgtgtcaattgaggtatgtcagaatacctatacttagacactgatatggcgtgatgtaatgcttctttgattggccaagccaactgagccttaatggcattgtagttagccataatataatcagcagtggtatccttaccactgcgctttttacctaaaagataaacttgtttcattgcatactcggatgacgacccctgatttgggcctgtaattgaacttcacgtgcctcgttaataggggcacgtccctctataattacaccattttgttcgacttcgatgtacttatagttcaatgtggcagtgcaatacatcggaacatctgaatcttcagctaacgagtactctatttcgcttaagtctgaaatccatgcaccgacataacgtatagtcattactatatcacgtttatcgttatcaagaatatgcattaaaactgcgtccgggaacccgtcgttgcgtccccaaccagatttatctcgattcagataattgttacatgctagcatccactggtaacactggacccaagattcaagcttttcatctaccaggaatcggcatgctacagcatcgaattctatgctagcagaacttaaagaagcccgatgcataccttgaggctgaccagccacttcagtaacagggatgtgaatccctggaacagcagctacttgaaggttcagtttaaatgctttagtgaggttcccatcaggaacctctaatagaaagtttgttgtgttagtttggttaaataacccaccattcgaatcgtgcattatgatttccatactgaagtagcagaataacgtttgcctttcgacataaactgctggaggggtaacattactacattagcccaatctgcaggcttaatctctatcatcggacctttgatatgtccaggcaaataggatttaatcatccggtcggtgcctttaaagccctttacttggctccagttgattttaagtttagtcttattggatattacaggtgtgttcgcgtattgcttcaggagctcttccaggaaagcctggcgcgctttaggaggtatgtagtgaaggttaagcccgtacataactcgtgaactaccgttttgaccaaatccaagattaataatcagcggatatttgtcccaatacggtagtgtatctttatgcttagcatcatagatatacgcatatagctttcctggttcaggcttagatacttggtgcccacgaacatttttcttaatggtatcattgaaccatctagccgatttgttgttaacagctgctccttcattctttattttttcacgaagagaactacggaagctgttaatcataattagctgacgttcagctttagttagcttgttctgtggcttcttttctaacttttcgacctttacggccgttttgatacgtgattggtaacgcgacatggctttagtgaacgaagcatagttgaatccacgttcttcagcgaattctttagctgtgattcctttggcctttgctttagcgtattcaacaccaatcttgacccattgctgctctgatttacttggtgcacgattaagcgctggagcagcttcacccaagaattcgattatagccattagcctttccatccaagtttcttgagggaatgctcagtaattagtctaaattttatacccattttgtcggcagttgcctgagctgctttccatttatcctgattcaccgaataagtatacacttcgtttatatagcgtttcttagctgctgtagtaagcttagcaggtttagtcggtggtacagtttctttggccggtttcacttcaaaaaagaactgctgcccgtctttaaatctaacccagaagtccatgaagtagcgccgtttctttccttcggcattacaaaaatatggaattacagtttcttcactattccactgaacaacctcaggatgacggtcaagccacctcattagatactgctcccatgaggaacggtatgtgatctttcttacatctcctttgtacttagagatattctccggcataaatttgcctttgtaggccataatgaagcctccttataaatacatatatcaatatttataaaaggatacact

SEQ ID NO: 70 - DNA, 47350 bp, unidentified
  source 1..47350: mol_type = genomic DNA
atgggggaagaaaaaagcgctacgcagtggctgcgcgtttttattctccccaccatgccgtataggggtaaactgaggcagagccacttgaaagaggaaaccaacatgactgacaaggtgaaggtgacgacaccgcggaacccagtcggcagaccaaccagctacaccgaggacatgccggaaaaactccttgaatatttccgtgtcgacgttgatgactatatccagcactcacacacgacagccgggaagagcaacatccgcattaacccgaagaacatgccgtccattctcaacttctgcgaaagcatcggcatcacgacgacaacgtttcatgactggcgttcgaagcataaggaattttctgtcgcttacacgcaggcgcgcgagctttacgagcagatgattctgaatattggcttcgccacgaacagcactttcgcgaccttcatgctgaaagcgaacttcggctaccgcgacaacactgagatcgtcgtgaccggtgacgccaacaagccggtgcggttgaagatcgtcagcgagcggccgaaagatgagaagccgcgcgaggagtccgaagccgtcgactggggtgacgactaaatactgcttgacatatctatgactgcgcaggaatatgggggccgggcaatcctgccctcactgcacaggacatcaaaatgactgaatcactgaaattcacctccccggcaccggcaccagttagcggcgttctcgcttgcgcttcccgcgaggcaggtgcagaaaataacctcaagctggcgcgagccatcgtagtcgaggtcgcagaccgtggcgctgaccagcacgtgaaaataaaagtcggcaccctgcttgccatggcgctgggccttgagggcgtcatgaaggttatggcgtcgctcgaggctgatcgcgacagcaagatcaaggcgctcagcgagtgggaagtgttcggcgtcgaaatgcttgagcagaagttcaagtgcctgccggtggtcaacatgaagccggaagagaagcgtaagcgcattgccgctggtatcgacacgctaacgcagcgactcgacgagcgcagcgaagacctggctttagtagatggacagctgaacgaatggcgcacgcacacccggcacatcctggatacctacttcgccacctaccccaccagcaacgccaacgacctgaatcttcgcctaatcatgaaggcggcgatcgagagcgcgcacaacaaaaacaagcagctgaacaaggactatgacgccatgcgcaacagcgccgacgcatcaaaccagctgcggaaggccgcagagcgggagcgggacgacgtgatcaacctcaaccgcaacgcagcggaagagatccagcacctgcaaaagcgcaacgagcacctcgatcagattgtcgtcgacctggtgcgccagcgcgataagaacggccagcaggctaaccagctggctaacgaactggtcgagaaacgcaaggagatcggcaggctgttagaaatcattgaccgtctgcatgcagagattgcagagaagcgcgacatcatcggcgcagcaacgcaacgctgcactgcgctcaccaatgacgcgaaggcgatgagcaagaataacagcgaactcgcagcacgcctggctaacgttggtctggagatcgccaactataagcagctcgtggaagacctgaaagcaggcaccgcctttgaccgtggcaccgtgaagcgccaggaggaaaccattgatcgcctgtatggtcagctcaatgagtggcacgactgggctacagacgtcatttgtagcccgtcatcactgggcggtgaagcgcagcggactgccatcaccgcagcgatgcgcaagcgcaaggagcgcattgagtcactggagcagatcgtgaaggatgtcgttgcacagcgtgacgcgtgggttatttgggcgcgcgggtacaccaacgcaccgacaggcatgcacagcaccgaacaacttctctcgatggtgaaggcgaaagtgaaggcgatcacagagggcgtcgacgggccagcggagcacaccatgtgcggcacgatgaaagtcacccagctgaaaggggatgtcgttgccagcgatggaagctgggccatgctcaaacacggcaacgcggtgatcgccggaaacattccagccagcaagctgaccctgggcgaggagatgaaagaggccattcgcgaagtcgtcagggaggagatgagcagcgcgttaaagaaagccatcaagaacgaacttgacaagctgaccatgtaacccatcaaatcattaaccagcggcccacgacgggccgcaatgaggtgaatcaatgcagaccttctacctagtctttagcgccattctgtgcctgttttgctttctctgctgcaaagggtgggcgacgaccatggacatcggagcagggaaagacaagcgcatgatcaggatggctcgcaccttcgacatcgctggcgacgtgttccgctgggcgtgctggctgttcatcgtcgcgggcttccttcgcaccctcggattgttctgattgcttacactttgtaccatttgcccggttgatcaccgaagtgactgactgataggctttaatgatactcgcagcgaggtggaaataatggggatcgtaatgggtgtgtggttggcgctggtgacagctatcgcgatgatcgcaattcacatggccgcaatggacagggagcggctcaaggccaacccggccagccaaatcaccaagctggtgatcgcggtattcctcctggtcggcgtagcgcacatcgccaccaggtacacagctttcctccgcgtgctatcctgacctgacaactgctatcatggccccgttaacaaaacggggcttttttatgtctatccaatctgacgccagtcaattcattgacctgacactcacaccaccgcagaacgactttctgcaactgtcgtgcaaacacccggccttcgtggcgggcttcggtacaggcaagagtcagaccatggccgtgtcgtccgtgcttgacgcatcagagggtggcgcagatgccacgatcgccatccttgagccaacgttcgacctgtgcaagctgatcgccgtgccgcgtatcgaacagatcctctccgagctgggcattcgctttaagaccgtcggcaacaaggagatctacacctcccacggcgggatcggcgactttctctttcgctccatggacaacccgactcgccttgtcggctgggaggcgttccgcgtccactgcgatgagatcgacaccctcaagaaagaggccgccaaaggggtatggcgcgcagcaatcgcccgctgccgtcagtcaccgaaggagtacgagccgttcgacttccttccgtcagaccgcccactgaacagggttagcgcctactgcacgcccgaggggttcaacttcctgtatggccgctgggcgaaggacaaggagcgcagccgaaaggccggttatctcatgatccaggccgccacctcatccaacccattcctgcctgccgactacctggacgccctgcgcgccagctacgacccgcagcgcttcgaggcctacgcgaaggggcagttcgtcaacctgaaatcgggcacggtctataagaactttaagcgcgagctgaatgacaccgacgtggagatcatcccgggcgagacgctgatcgtcggccaggatttcaacgttaacaagatggcgacagtcgtctacgtcgagcgctatggcgaggacgggcttgccgaactgcatgcagtggatgagcgacacaacggcatcgacacaccggacgtcatccgctggctggtcgagaagtaccagaactcgggaaatggctacatccacccgatcgaggtctacccggatgcgtcaggcggcaacaccagcagcaagaacgccagcatgtcagacctgtcgatgctcatgagcgcagggttcgacgtctactgtgggcaggccaaccctgccgtgaaggacagggtgatcagcgcgaacaccctgttctgcaacgccagcggccgccgtcggctattcgtgagcagcaagcgctgcccgcaattcgtcgaatgtctggagcagcagatctacgatgacaagggcaagcctgacaaggaggccgggaaggatcacatgaacgacgcaggcacctacccggtggtctataagttccctgtcgtgcataatggcacgatctcagcaaataatattgaatgggtacgatgatatgacgatcacgacactgccgcaggcggggacggtatccaccgaacacccgctttacaagcggtttaaccaggaataccgcactattgaagactgcgttgcaggacagacggtcatcaagcgtgccggtgttctgtacctgccgaagcccgaagcgtggacaatgaagcgttacaacgcgtacaagcgccgcgcccacttcctcaacgccacctaccgcacgcagatgggtatggtcggcatcgcgttcgccaaaccggccacctacaccttgccgacggccatcggctacctgtcgaccgacatcgacggcgaagggctggacatggatcagctcgttcgaatgtgcgtagcgcagaacatcaccttcgggcgcggtgggctgctggtggactatgacgccccggaggacgtcgggcaggtgacgacgctggtcaatagtggccgcgcgactatccgcatgttcgaccaccggcagatcatcaactggcgcaagagcggcggcaaatattcgctcatcgtgctgcgctacctggacgacgtcgactacgacggctttgagcactatcaggtggttcgttaccttgaactgcggctggtggatggcaaggcatattcccgcctgtggacggacgaactacagggtgccgccgggctgccttcctcggtcattcagcagaacgggaacatgaaccaggagcagcatgaactgcgcccgatcatggcccgcggaaagcagctcgactatctgcctttctgctggttcggcagcgagaagaacgacagcgacattgacccggctccgctgtccgacatcgcgaacaccaatatcgcccactacaacgccgacgccgacaacaccgacagctcgtttatctgcggccagccgaccttcgtgatcgccggtgtaccgcagaactttcagaaggacaatccgagcataaaggtcggcggtgacgaagcgatcattctgcaatccatgggcaccggcacgcctaccgccagtatggttgttgcaccaccgaacaccccggccgccgcgctgctggagaagcgtgagaagcagcttgccatgctgggcgcgaagctggttgagcgcaacggggcaacgaagaccgccacccaggctggcgcggatgagaaaaccgacaactcgatcctctcccagtgcgtcggcaacgtcgaggcggcgttcaatcaggcgatggagatggttaaagacttcactggcaccgaaggcgcgaacgtccacatcaacaagcgatacgaagatatcgttctgaacccgaccgaactgacagcctacatggcggcggtgcagtcagggatgatgcgtatgatcgacttcctcgcgtggcagcagcgtatcggcctgatcccgaacgacgcagatctggaagacgttgaacaggagctgaaagacggtgccgaagaaacgcagctgatcttcaacgcggctgctcgccagacccagcaggggctggacaacccgcaggaagataaagacccggaggaagacaagccgatctctaagaagaaggccagcgcgccgaagaagggggctaaatgacatccgttaactcgcggatggcgtcggaggcggtaaggcaccgcctctacctctaccgctacagcgaaggacaggcgaagaagatgacccagctactgcgccgaatgtccgtggacgtggtcggccgcctgctgtacgcgctggacgactcaaagatctccgccgacaactacacggtgaagcgtcttgaggccatcaaagcagccattaacccgacgatcaaccgcatctacaaaaccacctacggacagctcaaagccgaccttgaggcgctgagtaacggcgagctggcgtaccagtaccgcacgtggcgaacgctcatccctaacccggtgttggaattcgttggcggactggtggagatcccggaaacgcaggtatgggcagcggcgaacagtcgtccgttccagggcatgcttcttcgtgacatcccgtcagtgctgggcgaggccatgaccgactcaatcggccgggcggtgcagcagggtatcttacagggcgagacgtatgaccagatcattcgccgggtaaaaggcagcgcagcagcagcctacaaagacggggtgatcggcaccaacgagcgccaccttgccaccgtcacccgcagcgcagtgtcgcacgtcgcagctgaggcgcgggacaagatcggcgaggcgaacgccccgctcatcaagtcagaacagtggctgtcgacgctggacaataagacgtcgaagctgtgcatcatccgcgatcaactgctgtacatgcgggacaagaagcacacgccgatcggccatagcgtgccatacggcgctggccccgggcggctgcacatgaactgccgcagtacatcgaccttcgtgttcaagagctgggaggaattgggcgtcccgggagtcaagatcaagggcgcgtcgcgcgccagcatgaacggacaggtgccgatttacatggactattcgagctgggtggagcgccagcctatgagcacattgacgcaggtgttcggcgtggagcgggcgcagctcatccgcgacggcaagatctcaccgcctgacctgttcaacgacaagggggagtatttaacactctcccagcttcgcgaccttgaccgtatcccggcagaagactaacatcgtgccgttgacaacacaggagctatcacatgtggaaatacctgattaacaaagaagcattcgacgccctcacccctgaacagcaggctgcatacaaggcagtcggtgattctggcaactatgtgatgaacatcgaaggcatgcctgacgtgcaggccatgcagcagcagatggccgatcttcaaacccgcctgggcaccatcgacgcagagaaggccgccgaagcagagaaggcccgacaggcagcgcttgacctggcgaagaagaacggcgactttaagaccatcgaagaggactataaacgccagatcgccgagctgaacggcaagatcgagggcttcggcaagcagcgccgcgacgacttcctgaacgcgcagatcgataagctggccgcagagcttggtggcaaggaatatgccgcgctgttcaaaccggcgttgcagcagcgcctgtctgtcgagggtggtgaagatggctccgacttcatccctcgcgtgctgaaagacggcaagccgtcggcgatgtcactgaacgacctgatcggcgagttccgggcagacccgacttacaagccggtgtgcgtagcgcctgcatcctctggaacaggccgccatcaggcaccgaccccgacgcctccggcttccgataagctcccgagccttgacgatgtgcgaggtaagcaactgagccgcgcagaacagatcgcggcaagtatcagcgacgcagagtaagtaagtacaggcccggcatcgccgggctttttcttgcttgtccagtagttgccggttatcatccagacgtttaatcactcaaaggacatcgcgcgatgagctttactatcttccaacgaaaactgatcggtacgaccgttcagcttctgactgaaaacctgaacgtgttcaacgcggcttccggtggcaccatgcttatcggcagcggcgaggttatcaaggaaaccatggagaaaatgaccattgggatcattgacggcctggtgcaggatcgcaacgaacacgccccagttaacactgtggttcagccgaaggtgctttcccgcatcctgggcggctccatcaactccgctggccgccttgggccggtagccatcacctccggccagctgcgactgatcgagactgacgtgaaccgcgcggcagccgagatcgccaccctcgcgtcggaagccatgctgaaacgctacgtgacagtggcaatgggtgctggcgtggctgcgatcgaagcgttcggtcagggtatctatacccaggacgctcacatgaccagcaaggccggtgaactgtatccgaccgtcgaagacttcccgctggcggcgtccatcttcggcgaccaggccgacctgattcgcacctggttcatgtccggcacccagtgggcgaagttcggcgcacgtgaagcggtcaagtccgctaagctggtgtttgagctgggcaacatgaagatcttctctgacggcttcggtcgttcgttcgtggtatccgacgcggcaagcgctggcatctccgcggcgacttccggcggctccgcgatctacgcacctgatcatgcgattgttggtctggctgccaacgccattcaggtaacgaccaccggcctcaaaatggctgctgacccggccaagctgggcggcgagaacatcgaaagctggtggcagggtgagtttaattacagcattgccctcaaaggaatgcgtcctaccatggcgttccgcaccgccaccgaaggcaagaagactccgaccatggccgacctggtcaagaaagagaactgggaagccgagaagggcgaaaccgaccgcaagccggttggcaacgacgccgatccggtggtgccgactcgcaacgtgcgcgagacgctggggatcattatgaagctgaccccaactaccatcccggcagagcatgctggtgtgtaagcgaagaagtgaataatatgggggccgattggcccccttttcattggagcaaaatatgatcggcaatctggacgacctgaaagcattcgcggcggccaacggctacacgggaatgactgacgaggagctgagcaccgcgctccgccaggctaacctgtggctgtggtcactgtcatggaagggcgagcaggctgaacccggacaggcggacatttggccgcgcactatctgcgacgactacaactgtctcgactacgacaccccgccggaagttctccgctttacttacaccatcgtgtgcgacgccgtcgactctggaacggagttcaacaccgcatcggctggcgcgtataagaaacgcacccggatcgagggcgcgatcgatgtcgagtacagtgagcagagcctatacagcgcaggcttcgaggcaccctacatgatgggcatgatcgggcactggctggaaggcaacgggcgcggctgtaacgtcaagatggagcgcggataatgaacaagctatatcgtgaactgcgggcagaggcccgcaagctgttcaaagagtacggcgcagtcatcaccatcagcactccgggaggaatcagccgcgacccagtcaccggcgaggaagtggtgacgccgccgggcgcggtatgtaaggtgctgggcgtgatcaccggcgtcgacctcaagttttgggggctggcgaccatcccgccgggcgagcagcagatcgtcatggcatggacggacaccaccgggaaggagtgggagccgaagatgaatatgaccgtctcaggtggtggccgcacgtactccatcaccgagattaagccggttatcccagacggtggctacggcatcgtgtacaagctgaggatcaaggggctgtaatggcaagcaagcggaacgggacaatctttgccaacaatgtcgctcagtgggctggtggggtcgtcgagcgtcacgaagagatcgtgcagctggcggcgatgaaggtgtttgcgatgatcatccagcgctcgcccgtcggcaaccctgacctgtggaaccgcaaccagcaggccgtcaaggagcgcaaccgcatgagcgacctacgaacggccatgcgcgaaagcgacaccttcggctacacgaccaagcgcggcacccgccgactcaagccgggcgcgaacatcgttgcagcacctgcgaaattatcttcccctgtcgggccggtcggcccgcgcatccccagacttctcaagaatgagcagggcgtaaacccggtcgggaagggctacgtcggcggccggttccgggctaactggcaggtggggatcgactttgtccctattgagtggctggatgagcgggacaagtccggtacgccgaccatcaacaaaatggtgaacgccgtcgagcgcttccgcgtcgggatggctgagcatatttatttcgttaacaattcgccgtatggctacccgctggaatatgagggacactcacgacaggctcccgccgggatggtcaggatctcatgtatccaatttgaggaagcattcgcggcagcaacagcagaggcacaaaaattatgatcagcacttcacagattcaggcgaaattcgacctaatcgcaatgcagtgggggaacaacaacaatatcgccctcgtgtggcgtaacagcgccgataacgacatgaacgagcaggcggtgagtcagctggtcggcttcccgcagcacatcccggccccgtctatctctatgggcttccagcagtcagatatcgcgaagcgcgggatctatcaggtgatgctgcgtgctccgcgcctgtccggcacccggcagatctacgatgcagccgatgcgctggtggaggcgttcaatgaagcgatgttctatgacggtaattatgttagcatcggcgacgacgatcagcagctatacctaacatctccggcagaaatcggcgctgactatgaggatgacgccgggctgcatgttgctgtcacgatgaactaccgtatcaataacgtaaggggctaacatggctacgaaactctcatacaacatcccgaacggctcaacgctgcaaatcgctcagacgatgggtgcaagccttgccgtgtcgggtatctccaacgcgaaagaggcagtagccaccctgtcggctactgattccgggatcgctgctggcgactacgtccagctgttcaccagctgggtcaatatgaatggcctggtctgccgcgtgaaggccatcacctccggcaaagtgacgttggagaaggtcgacaccaccgacaccgacatttacccggcaggcggtggcgctggtacgatggtcaagatcaatgcgtggatcgacctgccgttgaccccgaccatctccaacgctggtaacgagcagcagaccaccacgttccaggctatccagcacgagcgcgcggtgaacatcaacacttacaagtcggcggcaacgcagaccttcaccatggcgcacgacgccagcgcgccagtgcgtgaagtgttgaagcagctggatcgctcgcaggacgtgacggcgttcaagttctacaacaagcgcgcgaaagaaacgcgcgtttatggctgccaggtatccttcaacgagatcccggcatccgaagtgaacaacgtcgagacgaacagcctcgttctgagtctggtcagtgagatggtgatctatcctgccgcgtaaagcgtgctatcatcagggcggcttaggccgcctttttcatatctggagataatagacaatggctgcaaaattcaagttagtacccgctggcacgttcgaacttccgatcctgatcaccaccgtagggcaggatgagcctacagagctgaaattcacgttcaagcgcatgccgctgaccgagctgaaagagaagcaggaagcgatggcgaagcgcgtgcaggagatggatgaggaatacaagggcaaaaagctgtccgtcgtcgaagatagcgtgctgcaatatccgttgatggccgattttgtgctggatatcgcaaccggctgggagctgtccgacaagttcacgaaagagaacctgatcaccctgttcgataactacccgacggcgtttatgtcgatcagcgttggctatcagtccgagctgtggaagctgcgccaaaagcactaaccgccgcgattgagggtctgtatttccccgatccgccgcagcagctggtcgataatttcgggggggagctggaagactaccgtccagaagtggagctatcagcagagattgttgatagcttttatttttaccagcgtattgatacccaatggcgcacggggccgggcggtttaatcggcctcgactacaacgtgatccccgtcatggctgacctgtatggcgtcaagttcgatcgcctgctcatggatgacctggcaatcatggagggggccgcgatcagagttctcatgagcaggagtgatacagcatgagtgaaaacacagaacgcttgatcgtcgacgtcgacgccagcggggtcaacgcgggggccaaatccctcgcagaccttgttgacgcggcgcaggacgcaggcagggcagcggacgggctgggcgacaagttcgaccaggtgaagccgtcagccgactcagcagccgcagcggtcgacaacttcaacaacgaggcgaagcagacgcaggaggctgctggcgacgctgccgtggggctgtaccggcagaatcaggagcttcaaaacctgctcgaccgcatcaggccaacgcgcgttcagcttcgtgacctggcgcagcagcaggaggcactggcgaaggcgcaggctaacgggctgctgggcgcgaaggaagcggaggagtacaacgctatcctcgccaaccgtgccgggatcatcgaccgcaacgacgctgctatgcgcggcctgaatgtgacgtctgagaagcagaagacgctacagcagggattaaccatcactaccgggcaataccgcgctgctatgggtatgttaccggcgcagatgaccgatatcgtcacccagctggcaggtggtcagaatccattcctgatcatgatccagcagggcgggcagattaaagactcgttcggcggactgggcaacaccttccaggcgcttaaacaattcatttccccttccttcctcgggctggctggcgcgacagcagccatcgctgcaatgggttatgcagcctacaccagcgcagaccaggccgatcgactcgctgcatcggtgacgctcatgggtggggcaggctttaagtcggccgaagagctgaacagggccgccgtcatgatccagaagtcaactggcgacagcattagcagcatcaccgaccggctgatcgagctgaacaacaagggcacgatgacagccgacatgatggagaaggtggcgatctcaacgtcgaagttgtcagatgccgggctggacgctggcgacgtcatgaaagacttcgataacctggtgaagaacccgatcaagtctatcgccgcgctcaatgagcagtatggtttcatgaccgaagcgcagatgaagcacctaatccagacgcagaaggagaagggtgagcaggctgctgctgccgaagcgctggacatctacacaacggccatgaataagcgggccgatgacgtgatcgagaagactgataacgtcggtcaggcatggaagacgctgaaaacagccgcgtcggatgtctttaacgatatggggatcgtgctgcgctcgtggggaaaccgagccgtcgacatcttcaaaatggtcaagctatcgatcgacgacctgctgaactatcttgcgcagatggacagcaaatttacgctgggcgttgctgacctgctggacaaggtgccgggcgttgacggtcgtggcgttctccgggcgatggggatcgacgtcgaaaccgtcgagaagaatggccgtgagtccatcgagaagggcaagcagatcgcgaaggagttcgctgaggtcagcaagcgggcctttgagagtcaggcagacgctgaggcgcgggcgcgcaacgccaacggcgctaccggcagcggtgctaccgatgagaagagcagggaagccgtcagcaagctggcgagtgagtcagcgaagcacaacaaggagaaggccgtcaccgttgcacagggtgatcgcatccttgagcagtatcaggcgcaggagctggcattacgggcgcagatcaagacgctgaaagaccgtaacgccttcgacgtcaacgcctccgaacagatgaagaactatcagctgttagtcgcgaagatctccatccttgagggtatccgggccgacgcaaaaggccgggcgctcaccaaggacgaacagtcgcttctggcgagcaaagaggaaatccttgcaaaagcaaagaccgtcggactgctgggcgatcaggtcaagcagcttgaacgtcaggcgcagatcaccgatgaactgacccgcagcggcaatgacctgtctgttcaggtggcggccattaacgcctcatggggaatgtcagccgatgaggctgcgcggctactggagaatatgcagcgcgcggcggccctccgggacaaaggcgcgactcaggagcaaatcgacgaggatgcacgccagcgtgaagcgctgcggcaggctaccgacgcgaaaacgcaggactgggcaggcggtgcacgctccgcgatcgaagcgtggggtaaggatgccaccaacacctcagccaacgtacagaaggccatcactggcgcaatggatgccgggctggattcgatcaactccttcgtgatgaccggtaaggcgtcgttcgccgactttaccaagtccatccttgggatgatggttcagatgatcaacaaatggctcatgttcaaagccatccaggggatcggcggcgcgatgggcttcgatatgtccagcttgggcttcaatgcgaagggtggcgtatacgatagcccgtcgctgtctgcgtacagcaaccgcgtctacaccacgccgcagctgttcacgtatgacaagccgaagccgtttgcgaagggtggggtgttcgccgaagccgggccggaagccatcatgccactggcgaaggattccagcgggcgtcttggtgttcgtgctcagggcggtgccgggggcggcgtctccatcgggtcgatggaagtgaatatcgaccagaacgggcaggcgacggccaacgtgtcagagtctggcaagctgggacgagcctacggtgatgcaatggccgcagccattcaggacggcatcgcccgggcaagctccccgggtggacagatctggatgcttattaacggtcacgcgtgataacctacagcctcccacacaggaggctttttttatggctacattagacgcgtggatctggccgctggcggcaggtcaacaggtatcagtgaaagaccgcagccgatcgaacagcttcggcgacggctcacagcagaacgttttagaaggcatcaatccgttcattatggaggtgccctgctcgtggactggcaacgccaagaccggcaaccagatcctgtccttcctgaaagcgcacatcaccaacccgttccagatggttccgccgcatggcgaactgggcctttacaccgtgaaatcaggcacgatcaaatatgtcgcgctgggacgtgcaaccatgaacatcaccttcacagccgagcaggccgtgggcatctacacaggggtgaaaggatgagcaacaccattttcgacgaagccacaaagctcgacccgtcgggcaagatcatcctcatggagatcgacggaaccgagttcggcgcggggatcatccggggccactattgccagctcccgcacacgagcaaggagatcctcgacagcgcgaacagcacactgacccgtgatcagcttttcaactgcaaaagcggcaatacgcgcggcaccgtcacgacgaatgaagaccgtaacaccatcaactttaagtcgctgagcgtcgactcgaacctggttttacctgagttctctggcggcctgactggtggcaagtatcaggtgatcgaggtggttggtcgctgggtgactccgcctccatcaactgacaaccagtatcagatctactacaaaaccgcagcgcatgatttttccaacagctacaacaagggcggggcgttggcatcagtaacgaaggatcttggtgatggatggctgaaattctcgttcgacatgtcgaagctgagcgctggcggttcagactgggtaaacagccagattatcggcattcgccttgacctgtggcagcaggaagtaggcgagatcgagatcaagcgaatcagcatcctgaataagaacccgcacgaggttgacgcatccaagctggccccgaaatcaatctggttcgacaacgtcgaatatggctattggccgtttatggctgaggggatcgagttcagcagcgagcagcaggggacgcctaccctgtccattggcaaccagtctggggtcgtcagcgcctacctgcgcgcctatcagcagatggtcggggcaaaggtcaagatcatccagacctacgcgaagtttctcgatccgcgcaacttcacagatggtaacgagttcgccgactcaatgcagcagtggacgcagctttactacatcgatcggccagactatgagagcgaagagtatgtgcggttcgcgctgtcgtctccgctcgacctacagaactttcaggtgccaacgcgcagcatcacgacgttctgtcagtggcaggctcgcgggctttacggtaaaggccttgacgccggggaagaaaacgggtgcagctggaaccgtggcacagctaaaaagtggtacgacaagcacgggaaccaggtggacgacatcacgaaggatgagtgcggcgggtgcattcaggattgccgcctacgcttcggtcagctggtgagtgacccaaaagcggccgttctggactacggcggttttatctctgtgcgcctgattgattaaacgcgctgtatcgcgttctgcggcgttttcttgcgtaatacgtccgaacgtatggcctgacggcgttaaacgcgatagcgtgccgttcaggcccgtagttttcgattcacgaagataagaatacatcccatagccatatataataaaaaccctcccaagggagttttatttatatggtcttgggtatgtcttatatgtatttatggtaataaatatataaacccataccacctaacacctgaaattcagccttttaaatcaatagcttaaaatttcaggtggtgccaagtggaggcaaaaatgattgacgtaaatgacatcccggaacagcaattaacctatattaaacaacaccttacagagtgttcgccgcaagagggctgcgggctgctggtggattcaggtggaggcctcgaatactggccggtcatcaactcagcggccgacaaaatgaacagcttccgcattgctccgcaggacttcgctgaggctgaggacgcaggcaatatcgttgccgtcatccattcacaccctggcgctgacggcctggcctacccgtccatcctcgatcgccagctcatgcaggaaacttgcttaccgtggttcatctacgccccggacaaggatgagctggcggtgttctttgaagagccgaaggggctgctgggtcgtgactttgtgctgggtgcgaccgactgctatggcctggtgatggcgtggcaccgttcgcgaggcattcagctccctgacttccgcaagccgtacccgtggtgggagaagggtgaggagcttttcacggatgagaatttttcagcagctggatttatcaagaaggccgaggcagagccgggcgacatggtggtgttccgtatcgcgtccagcgtaagcaatcactgcgggatctacaccggcgacgggatgattatgcaccacctcatgaaccgcaaatcgaccattgataggatgtatggcacctaccttgagccgcgcattactggtattctccgacatgagttactaccggagatcacaccatgggaaaccagctaagcaccatccgactatacggcgaaatgggggcgcgcttcgggcgcgtccatcacctcgcggtcgactcctgcgccgaagcaatcagcgccctttccgccatcctccccggattcgatcaatacatgcgtgacagccagtcgcgcggcctgacattcgcccctttcatcggaaagcggaacatcggcttcaatgagatgtcgcagccaatccctgacggcgaagaattccgcattgccccgatcatcatcggcaacaagaagggcggcctgttccagaccatcctgggcgctgcgatgattgtcgcgggcgtcgtggcgtcgttcatccccggcgggcaggctgtctccccttacctcgttgctgctggtatctccacggctgctggcggggttatgcagatgctttccccgcaggcgacaggcatgaagatccgggagaatgacgccaacgcgccgtcatacgccttcggccagccggtcaacacgacagcacaaggtaacatcgttggcgttttgtatggcgagcgtgagatcgggggtgctatcatcagcgccggaattatcgctaacgaggtacgttcttaatggaaatcaaaggatacaagggcgggagtagcaacgtgcatacccccgttgaagatccagactccctgatcagcaacgcaacggtaaggatgctcctggcgttgtcagagggtgaaaccgtgccgattagcgcggaagacctgcccaagcgcgtttacatggacgggacgcccgttcagaacgatgacgggtcagtaaacattccgggcgttactctggaatatcgcaacggcaccccgcagcaggagccgatcaacggcttcccggcggtagaaagtgaaacacgaatcaatgtggagctgaaaaagtcttctgcatgggtgcgtaacatcaccaacaccgagatcgacgccgtccgcatccgaatgaatttccggctggtcatccagcagaaggacggggatcgcgtaggcggacgcattgagtaccggattgaataccgcaaagtcggcgacagcgcctacaccgtggccttcaatggtgctgtcgacggcaagcagaaagacaactatgaacgcgatcaccgcattgacctgccgaagagcagcactggctggcaaatccgcgttacccgcctaactgacgacagcacgtcggataccaccgtgctcaactccgggatcgtggctgtcaccgagatcgtcgacgcccgcgttcgttacccgtggacgtccctactgttcgtcagcttcgacgccaaatcgttccagaacatcccgaaaatcagcatcaagatgggcggccgtctggtgctggttccgtccaactatgacccggttaaccatacctatagcgggtcgtggaacgggacatttaaacaggcgtggacggataacccggcgtggatcgtctacgacatcattctgcacaagcgcttcggtattggccgccgtatcccgtcctcattcctgaacaaatggacgatgtacagcatcgcacagcgctgcgatgagctggtgacgaacgccgacggcacgcagaatcgccgttacacctgtaacgtgtatatccagaaacgcgcgcatgcgtggagcgtcattcgtgacctggcgtcgatctttaacggaatggtcagctacagcaacatgcagcttcaatttgcgcaggatgcaccggcagaagtccgccatgttgtgacaaacgacgacgtcgtgaacgggacgttcgaatattcctacggcagcatggctaaccgccgcgggatcgcgatggtcacttttgacgacccgaaggcgcactataagacgcagaccactgtggcgcagatcaaagacctcgtggagcgttatggcgttgagccgctggaagtgtccggcatcggctgcacggacgaatacgaagcgcaacgtcgcggcctgtgggcgctgctgtcgaataccaacgacatgcagatcagctaccgcgtcggcctgagcggcatcaagtacctgatcggcgacgtcgtcggcatcgctaaccgctacgtgcagggcggtcagttcggcgggcgtgttgctggcgtatccggcaccaccatcaccaccgaccgcatgatctccgaccacgtggcagtcggcgacagagtgatcgttcgtcaatctggatcggatggaacctacaaccgcgtgatcaatgcaatcgcggctgaccggatgtccttcaccgtcgacggcgctaaccttgatattcagagcggtgaagtgttcctgctggatactaaggtgctggcaccggaactaatccgcatcaccaagatcacctacaacgagcaggacaataatttcaccgttaccggtctgcaatacagccactcgaagtatttgcaggttgacaccggcgcgcgaattgaagaccgcccgacatcgctgatcccgaccgggcaggtacaggcacccgctaacgtggtggccgaaggctacagtatcgttaaccaggggattcgctcagctaacgtaaactgttcatggttcaccgtagatcaggccgtcagctacgacattcaggtgcgccgaacctctcagtcaaacggccagtggtcacaggggtggactaaccttgccagccagtcgagcacgtccgtagacctgaccaacgttctgaccggcacctatcagttccgcgttcgttccgtatcccgtgacggcgggtcgtctcagtgggtcgagtcgaatcaggtgttcgttgacggcaagcgcggcagcatcccggcagtagctggcctgaatggcgtaggcatcgttaacggtattacctggcgttgggtgactggcacggatgatctgatcgacatgaagtcgacagagctacagttccagcgcattgacggaaatggcgctccggttggtgggtggatcgatctcagcgtcgtgacctacccgacagggacattcacacagtccggcctgaaatttgccgaacgcgtgcaggtacgcgctcgctttgtgtcgtcatatagcgacgctggcgagtggagcgccccggtcatggcgatgacgtccgacaacatggacgactattaccagaacatcgacgacgcgatcaaaggctccgacaccttcggcgaacttaccagcggcatcaaagacgtaagcgacatcgcacaggcagcgaaagacgccgcgcaggccgcgcaggttactgctgacggagcagtggcaaccaaccagcagcagcagcagcagctgaacaaccagctggccgagatccagaagaacgcgcaggccatcaccaccaccgctaatgcgggggcggcaaacgccagtgcaatcgctcaggagatccttgaccgcaaggctggcgacatcgcgaacgccaacaaggcagctcaggacgtggccgacgctatcgcgaaggctgagacggatgacgcagaagtggcagcccaggctgcggctaacctgctggcgacaaaaaacgaagtcgaagcgcagatcagcaccaccaataccacgatgcaggacggcttcgacagtctggctcagcagatggcatccatttccgctggcactggcgagcagttcgacagcctcgctatctggtacttcgacaatggcccggaagggtgggcttctgacgacgccaacaccaatctgctcccagtagaccaagatggctggatttacccagctggcgcagcatctaccatgcgctcaccgaacccgctggcaatcgacgcgcgcagctataagtacatgcgcctgcgcatgaagcgagtcgggaacccgtcatgggctggcaagctgtattggatcggtgttgatgagactggctggacaagtggccgctcgcttgctatcccggcacctgactttgacccgaccaccgggatcactgtcctgtcgctccctgatctcctgtgggcgacatccggcaccgttcgccgccttcgtctggacttctcaaccaaccaagacgccaataactactacgcgatcgactggatggcagtcggccgaccgaccccgggcgcgtctcaggcgcagattcaggatcttcgcaccgccatgaccgcggcggactctgccgaagccgcagcgcgtaacacgctggccgtacagctccgcgggaactatgatggaaccgacccgtccaagctggtaacaggtatcatcttcaacgagcgccagacccgagtcaccgcagagcaggcgatcgccagcgacgtcaacaccctgcgcactgactacaacgcgaacaaggcctccgtgacccagcgtctcgacacgctgaccagcgagaaccaatcgcaggcgcaggcgcttacccagcttcaaagcggcctgagcaccgcgaacgggaagatcggcgctaacgctacagccatcagccagctcaagacggacgtgaccgcgctggatggtcgagtatcggcaaatagcggtctgatcactaacctgcgcagtgacctgaataacatgcgcgtcggcggcaccaacctgatccctaactctggcacgctggcaggcgtcagcggcgttgtgcagggtcagacgtacaaaggcaatgctatccgtcgcatcgcgattgcagcagcctcagctggctcctacgaccaatttgagtatgagcttgcggctccgatagacggaaccgaagtagtcgtcagcttctacgcgaaagcgaacaacgccgacagcaagcaaattttcgtctacctgtacaacccgaatgccacgcttacggctttaagcagtcagggtaaaactggcagctgggctactggtggcgatggttcaatgacaatcgaccttacggaagactgggcgcgctactgggtcaagtacacccgcaagagcggccagacaggcacccagcgcgtcatctttggccgactgctgaaagggtctaaggacaaagaggtttacatcagctcgcctaaattcgaatacggcaccatgcctaccgaatggagcgaagcaccggctgacaatgccagcgcaagcgcgttgcaggcactgaccacgcgcgtaactgctgcggaaggcaccatcagcaccaacagccaggcgatcaccaagctcaaaggcgacgtgagcactttgcagggtcagatggcgaccaaggccgaagcgagcgcattgcagcagctggcgaccactgtcacccagcaggggaacgccatctcttcgcagggtcaggccatcaccgatttgcagaacaccgcgcagaacggtaaagcgaagtactggctgaccaagatcttcgacattaaggttaataccggctacgtgccgaagttaacagatctcgcaggcgtaccgccgctggccgtgtacgagatggctgacgctgcaaagctggatttcctgacttacggcgactacaaaatcgcgtatgtgaaggcgctggtgtatgttgcggctgataagaccattgctatctcgcccggttccagcatcattgacgacaccggacggctgtacatcaatggaacggaagcggcttccttctctgtcagcaccagcacctacagcatggatctcaaaaaaggctggaacacgcttgagttcgttgttgcgcagtacaccggtcagttctatatcaactttggcctcaagctgtccgacaacgtcgatcagctgttcagtggtgccggtcagctggccgctgcatccgcatcgcaggtgctctcctctcaggttgagcagacctccgggaaggttgacgcgaacagcgccgcgatcacttcgctgaacaactcggtgcgggacatcaacaccgcgctgaacaacaaggctgacgcgagcgcgttgcagtcgctaactacccgtgtcaccaccgcagaagggaagatcacggcgcagggtaacgccattacccagctcaccagcgacctgtcgacagcgaacgggaagatcactgccaactcaacggcgatcaataacctgacgacccggctcagcgcagccgaagggaagattgactcacaggctgagtccatcacctcgatcaactcatcgatcaatggcgtactgacccaagcggccaaccttatcccgaacccgacggtagatcctgcctatccgcaaatgggcatgaccgttgtttccacaacgtcagaaggcgttccggctggatgcccttacccgtgggcgattaaatgccagtaccgcgatcacatcccgggtatggacaacatcccttgtcgcgaaggtcaggtgtttgagttctctgtactggccgcatgcggcaccggctccgcaccattccagcactacatcggcacgtcgacgctggtttctggcagcatcgggtcgccactagcgaacggaggccaaatctcagcggctaccggcgcacagtggacgcgcactacgtggcgctggacagtaaacgcggcgcagggggcgaagggttacttcagcccgttcctgcaaatcaaccagtcaggccctaacttcgggacagtatggtatgcaactgactggagcgttcgcgacgtcaccgcagcggcgaatgccgaaggcaaggccgatgccaacgccacggcgatcagccagctgacaacccgcgttacttctgcggaagggtcgatcacgtctcagggccaggccattaccaaactgaccagcgatctgagcacgctgaccggcatcgtgaacaataaggctgacgcttcggcgctgaatgcgctcactacccgcgtatcgactgccgaaggcaagatcgattcacagggccagtcgatcacccagctgagcaatagcctgtccgcaactgacgcctcaatcgacgcgcagggcaagatccccgggaacctgctggctaactcatcgtttgagcgcggcccggttaacttcaccggctggagcagccttgccaccatcatcacggcaacacagccgcattctggcaccaaaattgtcaagatggcggcaggcggaagtgctggaatcagtcaggccgttgaaatcacgcagggccgccggtatcgcttcggcgtgtttgccaaacaggatgccgggactgtcatcaacagtcagagcaacacgaaattccgcattgctgacggttcagacaacctactggccgccgtcaattacgggccgttcactaacacatggcagcacgtcttcatggacttgacggccacgaagactaccatcgcgctgttccagctgactacattgctgagcgctggcgcgatgtacttcgacgatgtatacgtggtcgacatcaccaacgacaccaagattcaggcgaacgctgacgcgatcacctcgctgaactccacggtgacgcagcagggtaacgacatcacgtcgcagggcagcgcgatcacccagctgaacaactcgcttaaaactgttcagtacagcaacagcaacccgtgggtagatggctcgttcgagtcgtatgacaaccagcaagccatcggtggatctaatgccctggtcactactgacttctcattcagtggtcagaagtcgcttatgtgtcgccgctacaacggtgaaaccggcaactctgacaagaacttcggcaatgaaacagctattcgcgagtctgcggtttaccgcttcgaatgctgggcgatgatgccggaagatgagacgccgccgaacgggtggaactgtgttgtgggcttactggttcgcaacacagacaaccagaacgcatggcctagcgcattagtcatcacagaggcagggcttgctgctggtggcggccgcggtcagtgggtcaagttctccggtaagctcggcttagacggcgcaaagaaaacacgaggtcgcctgtggatctccactcgcggcacgtccggcggcccgggatatcgcatctatatcgacgatctggtgatcaccgacgttaccgatgcgcacgcggcgcagaccaccgcagacgctaactcaagcgcgatcagcagcctgacctctaccgttacccagcagggtaaagacatcacctccgcgagcagccagattactgcattgcagaacaacctgaacacgacaaacagtaatgtcagtaaaaaggctgactcaactgcgctgaccgccctaaccaaccgagtgacgtctgctgagggcagcatcacttcgcaaggtcagagcatcaccagtctacagaacagcatcacctacggcgacaacctggtgcctaacccaggaatgctgggcgatgcccagggctggacgaaggccgggacggagaccatcgacggctatccggcggtgtactccacggcgagctataacccgacgtcggggaaattcccggtcacggagggtgagacgctggatctggcggtgtcggtaatggtcaacatcgcaggcgcgataacagtcgggctgcgtttcgacggtccgagtgtcagcaaccagaccgcgtatgccaccagccgcaccatgaccgccggggagaaatatcgcttcaccctgacgggcatcacggttccggcaggctgtacgaccgcctacatccaggcgtggagccgcgccgccaatacccgcgtcagcctgtataacccggtagtgacccgtcggggcgctgggatccaggcgaacgctgacgcgatcacctcgctgaactccacggtgacgcagcagggcaaggacattacggcgaacacgaccgccattaccgggctgacgagccgggtggggacggccgaagcgtcggtcaatgccctgaacgagacgacggcggctaacggtctggcgatggcgaacggcttccagcaacttcgtgcgcagatcggcgacaaccaggcagccatcacgcagacgagccaggcaatggtggatcttgagtcttcaacggcgcagcagatcggcacaattaaggcgtcagtggatggtatgagttccaccgttcagcagacttcaacggctgttgcggatatcaacggcaagctgtcggcgcagtggggcgtcaaagttcagactgacaccggaggcggaaacccgcgcattgctggtattcagctgggcatcgacgcaactggcagctcacagttcctggttcaggctgacaccttcgcggtgtacgctggaggcagtaacaagacgttcccgttcgttgtgcagaacggcgtggcgtacatgcaggaagcgctgatccgcgatggctcgatcaccaacgcgaagatcggaaacgaaatcaagtcgaacaactttgtcgatggctctcagggatggcgcatcggtaaagatggcagctcgcagttcaataacgtgatcgttcgcggcagggttgaggcgaatagcggtattttcaagggaacggtgcaagctgagtcttttatcggcgatattgctacttctgcatcgttcaacggatttactgtcaagggcggtgaaggttctggcactatgaacgcatggtatcagaaccgcgggtatccgatgaccatcacgctgaactgcactgtgcgatgcaattcatactctggcggtgtaggcgaccaaagccgtgacttctatgtggttctgacattcaacattaacggagtgcagagcacgagacgcgtcgttgttgatatgcgggataaagcacacggccttgtggatgttccgcagtcgttcactgttaacattccagcaagtaacgaccgaatcggcatctcgctgactggcgcaagttatgggccgcagcagagtgaagtcacagtaagcaacattgttgtgacggcattccgaagcaacaacggttcttttggacaataaggagcggcccttcggggccgatattaaatggcaaatattagcgaccaactcgcggctgatattcacaacgcattcagcaaatactacacagacctcgccaatcaggatcagatcttcttcggcgttggcgacgtgcagatcaccaagcaggacggaaccaccgcaacagtgcgctcatggaacaaggtgatcggctcagtggataccgcagcacaacgcggagctgcgaacaccttcacggccctgcaaacgttcagcgccgggattaatgtttctgtcggcaacatcaacgtgatgaacgacaacagcatggtgatccttggtaaaaacagcgatcttgcactgcttaaaaagagcggccagggcggcaccatcgccgtcggcagcggcacgccattcaagatccagcgcacgaatacagcaactgtctcaccggcttctacggtcgaggatattttgaccatcggcacggataagaaaaccacgcttgccggagcgcttgccgctggtggagatgtaacggcgagcgggaacattgacaacacggcaggcgggaaggtgtattctcaggcgcttgagctgtcatttagcacgccatacatcgactttcattttaactacagtaccgacgacttcaccgggcggattgtagccactgccgccgatcaaattagtgtgcaaggtagtcatttgcgagttgacagggatcttcgtgtttttggtatggcagacattaaagggtgggcgcaatgcggcgtcgatctttcggccaacagaacagacttcggttcccctgctattggctcgttggtttcaggtggaaggattcgatctcgaatgctcgggcgcggcggtaacgttgacccatccggggcgtggggcggtttctatgttgaggagtacgtgggaaccgaacacaggattatcatgtatatggacggcttcgggagaacagacgcatggtcattccgctcaggggggacaatctccacacccaaaggcgacgttctaactaccggctcagacgttcgcctgaaaacagacttcacccaagcgcctgagaacgcctcagagcgcattgaacgattgggggtgtgtgagtacagggtcaagggagaaacgcgcgttaggcgtggttttatcgcacagcaggcggagaccgtagacgaggtctacacctatcaggacgtcgagcaggagatcgatggcgagaggttccgggtgatgaacgtggactatgtggcaatcatcgctgacctggtgtcttcggtgcaggagcttcggcaggagttgaaggagctgaaaggtgaataaaaaaggggccatcggcccctttctttacagcacgtgataaagaacgttaatcacgaagcccaacacgaggccgatcgctgctgccagtaatggctgtttcattttgtcaaacacgttattcaccctccactttaacgagttcatgccattcgattcccaggggcttcgcaaggcggatcatggtttcaatggtcgggaactcacggccattgtcataacggcatacgcggcactgcgcaatgcctgctgctttcgccagaccacgctgggaaaatccagcgcgctcgcggtgttctttcaaaatcagtgtgatgttcattttctacctcagaacgggatatcgtcatcaaagtccatcggcggctcgctggactgctgctgtggttttgactgctggcgcgctgggcctgaatgcgtgcgcggctgtccctgagtctgtccctgcgcctgtccctgctgtccgccttcgctcttgccgcctaacatttgcataacggcgttaggcccgttcagaaccacttctgtcgtccatttctcgactccgttgctgtcagtccattttcgtgtttgcagctttccttcgacgtagatctgagaaccttttttcacgtactcgccgacgatctcagccagcttcccgaagacgacgacacggtgccattccgtttgctcctttacttcgccggtctgcttatcgcgccatgattctgacgtcgcgatcgtgaggttagccaccgcgccgcctgacggcatgtatcgaatttctggatcctgaccgatgcgacccacgaggatcaccttgttaactccacggcttgccatttataacgctccttaaaaatcttcttcgacgtctgattgctgcggcggtacatcttgcggctgaacgtcatcaggtgcaacctggacggtagccttaccgcgtttagcattggctggcttgccggggttgaacggtcgggcctccgcgtttttcagctcgacgatcttgctggcgcgggcatcttcgacgatgcgcagtgatgccttgtcgctgcggaacagctcgcacgcggcgcggtagattgcatccacctcatccttgtccttcgcggcttcaatggagcggcggcagtcggctgcgctacgcactgatttgttgccatcgtcgtcatccatggtgaggccgaagatcgaaacgcgggcatagcggcgggcgtaggtcagcgttgagccgaagccctgggcgtcgttcttcgccagcgggatctggcagatatcggacagccattcgcctgtggcaacgtggatgatgcgcgtctccatcagcatcacgttcggagcctgtccggcctcgtgcgtcggagactggatcatgatcaaccctgcatcttccattgccgggccgatggcggccgcaacgtctccgagggtcgcatagtggtttttcaggtgctggttctgcttggacttcttcggcgatacgcacatatcctgcgcgtgggcaaactgcttaacgatggtgctgcatggctgggagaatttcatcatttggtcactccttatattgagggggtaatatgtcagtatattaccccggaatcaattattttttggttttcacatcttcccacaagtggcggaaggcgttttccaggtagtacggaggatcgaggtcaatcacgcttccgccgccgtaggtcggccacgtgtcattgtcccggcaccatttaaatgtggctatggcttcacgcagctgcgcatatccaatcatcagagttttgtttgacaaggcgaaaggagcgacgacgaacgggctgctcttctcctgcgccaacaacatcgtccttctcggtttctggccgaaagccgccttaaacccctcgcgctgcaacgccattttcagcggatacccgagatcgaagcacttacgcatgaatctttcagggttggccgtgtccgtggtcttatagtccaccatgtcggcgaacttgctgatccagtcgaggcgcaccttgcagcgcaaaccctgatagctgaaaaagatcgagacttccgacattccgtcaacgaaatactctttaaacgagtcgttattaaacagaacggcgcgcatctcctgaatgatgtcataatcctgtccgcgaatgccttcacgatcaccgcgctcttcattggcctttttcacgatgtcgtgccagaaaacaacgtcagttatcccaagagctgcggcggtgttggtgactgtctcaattaattccggctctttcattttcgaataaccggcaacaccgtgttctttcagaaatgccttcgcggcctcaagcgaggtaataaagttcggctgcagaataatatcgccgttatcgtcacgcttaataaagtcctctttctcaggcatgcggaaatattcactggcaaataattccggttcgaggtggttagcgtgggcagcagttccgaataccagtgcgcgggattgctttttcttttcctctgcgaacttccagttagccgggcatgttgagaacagctcccacaagccagagccgttcatgtggtctgtctcagcgtgatagtcttcgttcgacagatcgttattagtaaagaacagcacttcatcatcttttagcgatttaatatctgacattacatgatccccttattcatatctaaccgaagttttcgttcgatatcttcctgcctgacaaagcggcgtgagtcgcccttgcaattaactttcaatagccatttgcttttattttcaatagccggatacttcacggcaggatcgcggaacagaatctgaccaagcatcaactcggttccagtgggtacgccgcaaaataaaacctcccatagcacgtccctaataagattatttcccggtgctctatatgtgagaaccactttctttaatgatcgcataaggccgtaagcctctttgaatgttttgcggtcagtgttgcgaatgccgccgtgcaatattctgtgtaactctgcatgtgtcatgatgacctcctgtgtggtgttcgggcatattacttccgcataataggccatgtcaaggctatttaactatgatggtcgacggcccgaggaagtcgatcaccgccagcttcgcgcagtgaaagccataagccaccgcagcgaagccgccctgagcggatacggcggacaggcattcaacctgctccttgctgactggcgtcgacagctttttcgtctctcgcttcatctcgatcaccccgaacggctccccgttgcggccgcggtgcaggatcacgatgtcagcgacacccttgcgtagtcccttcgcctgctggcgcaggaaatactgtttcctactgtttcccggccttcccgccgttctcgttcggcacatggaaccagtacacgtctggataccaatgattaaaccaggtggtgaagttaatcaggtggtcatcctcaagcgccttcgtcggttcatctggtgggtaaagatattctttaatcacaggtcatcacctccttcgaaaattttacgtgctatgacgtcgcgagactttcttccgcctatgcgccggtgcgtcacacgcttcggcgctgcaatcaggtgagcggacggcaggatcttcgtttttacccctttccgcatcttgccccgggtgttcggtgatgcaacgtgcttatccagtgccgccttccactgctgttttgctggcatgctgtcactgtccggccaaaacacctcataggctacgaagtcaggatccccctcattccccagcacgtagcggaacaccacgccgtttccgcatttcgtcggttcaacgttgaaggatcgcacgtccacaaagtcatcccgggtatagctctttttctcaaggctcctgtttgggtcgatcaacgtgttcccgcagtgggcgcactgccgggcggtgatgtcgttctccgcgccgcatccgcggctgacaaccacgccgcgatcgttcttaaagtcatcacatgtgcgcgagatgaaccagtggtgacagcggtcgtccttgcggtatggcgtgccgtcttcctcgatcccgtcgtggtcgtacacatggcggcaccggcgcgcgtgcttgccgttcgtgtgtccataggggcattccttcgtctggccggtgctggtgtccgtctcatagcggtactgctcaaggaatggcgagaagtacagttccgccaggtcatccagcgctccaccgtagtcgagaacaaggttgtcctctttgaccatccccagctcttctatatggaattttttgaggatgcgcatcccgcgaccgatgagctgaaccagcagagtgaggctgccgatcttgcgcaggataacgatcgtgtcccatggtggaacgttgtagccggtagtgaggcacccgatctgaaagatgaatttacagcggttgttaaatgcgtcttccagtatccggtcgcgctccttctgtggcgtgtcgtcggtgatgatcccgtaagtcacgccgggcggtaacgcgctggccgcctccttacagtgcttcttaccggcgcaggtaacgagtacgcagttacggttggcggtacgcttcacgacgtcgagcatgatgttttgcgtgatggttccctgggccaggatctgcttctccatctcgatcaggtcggcatcactgaattcgtcgtcaccctcttcgccgcgactcacgaaagaatcaagctggtaggtcagctcatcatcgatcgcaccgtaatgggtaggcaccaccgcgccaacttcaaccaggtactcagtggagatgtcacacaccgcacgccgccagaatcctggggtgttcctgtcttcgttgatgatcggctgtgtgcctcggtagtcggtgccggtgtacccgataacaaccagatcccgaccgtacatctcccggcaacggcgctgcatctcccggatgataagcgtgtacccggtgcggccagcgtcgatcatctgcgccagcgtgcgttctgcgttgcgctgcaacctctcgttgtcggggtgcttatcagccagctcgcaagtcatctcgctttcaacgatgtcgtcgacgttgacgtgctggcattcgtcgatcagcaggaagcgcggcacgaagttagccagctgcttttcaagggcgttgaccaccgtcttctcgctgccgcaaatgatagggaaggtcgtggatttcatgcgcaggccagcgctgaacacgctgttctccaccccgaagttccgtatctccatggcgttctgcttgatgatcccgccctgacgtgacaacacgagcgcgggcttgttgagctgggtcaggcggctggccaccaggctgatcagcgtggtcttccctgccgacacggcggccttgacgacgaacgggccgatctccttgtagttgttgatggcctgcgacgtcgcaaagtgtgccgcgaactggaacgggtaggggtcgtatggcatgccgcgaagtcctcgcagtagctggccgcgaaccgcctctatgtccgtctcctcaatcatttgcttgatgcttttcaccttttccattgttgcctcgttgacgtggtaaacattgcaatatattctgcacaacgaataccaaaacacaaggaatttaaaatgatgaatattggcaaactacccgaaccagaaattcacgagggcgcgatacagcgggcttttgtgcgttctatgggcaactcattccagatcatgatcccgaactactacaccccggacaacctgggctatgaggctgatatgttctgcatccgcaagagccgctacacggtggaggtggaggtgaagatctccatctctgacatgaaggccgacttccgcaaggcccacacgatctacccgaagacggcggaggaggctgagaaatattggcggattgatggggagcgcgtcccttacccggtgaagatgaagcacgactgcctgaaagctggtgagctgatagccaatcgcttctacttcctggtgccgtggactatcgccgacaaggcgcgggagatcctgccggactatgccgggctttacgtgtacaaccagcgcggactggtacacgaggaaaagatggggccgatgctgcacaagcgtaagctcgatccgaaatatgaccaggggatcatggcaaacctcaacgcccgctacctgaatctgtggaggaggtcatgaagttctaccccattgagcagatagaacgactcatgatcgggcgctgggagttgctgctatcccagtattgggataagcgcgcattcaacggcaggcatcaggcctgcccgctgtgcggagggaatgaccggttccgctggggcgaatcgaagcaggacgtcacgatgaagggtcgcggtgctgcaatttgcaatcagtgcggatcacacctgggcctgtggtggttcatgcaaactaccggctacgaattcccggtggcgctgcatgagataggggccaacttcctcaaggtcgagcctgaccaggaaatgacgaccgagccggtgatcgcccgcgacgcattcccgaaggctccgcgcgtcaggctggaagagaaaaacttatcagcctctcagaagtacatccgcaagcagcaggccgcgcctgactatgatcgccggttctggatggcctacgacctgatcgagacgatgcgaaaatatcacatgtgaaatacagttgacaggtatatggtgcccaagtaatatgcccgaacacccaacagaaggagcagcaaaatgtcagaacaaaccaccgtgtcaccgaagaccgccagcgcagtagccgaagaaatcaaaaaagctattggccgccgccgtatcccggtaattgtcgcagaccagccggccatcgcgttcatgatcgccaaagaggccagcaaaacaggctacggcgaagatgagcagctgggagtgaacgccggattcaccgagaaggacgtggtgaaccagatcgctaacgccgcgctgttcagaaagtcatataaccgcgtccagcacgtcgtcgtcatcaagtcgagcaaggcggcagcggctggcaactttgatggccgctacttcgtgaagatcatgtgcaatcgcctgtatgtcaccatgggtagcctggctaactatcttgcgggggcggaatagtgagcgtggaaaagcccgtggttatcggctgtcggaagatgatcaaaggcagcgagcgcggaaagatggtctgctgtgggacatacttccacgctggcgggcgaagcagatgctggcacgtgatcgataatgtcgtggtgtgtaaacgttgtttcaaagagtggaaaaaggagcacaaagatgaagaaagcgatatttctgtttaaccgctcgcggcacatgttgcagccgtggttagacgctggctatgagtgctggacatttgacgggcagcttcctgacggtgttcacgaggttgagccgggattgatggcggttggcatgtggttcgacgcatcagctaccagcgtgcatgccagcgacgtagccaggatcgtaggcggtggcgtgaagttcatcgcctcgttcgcggaatgcacctacctgaccaccaccggcgcgcgctggctgtatcaccccgacgaccgcgatctgccgactgctgaacgccgaccgcacccagcataccctaaccgccgccgtgatatggacgacgccgttaagctggcgaagttcgttgagctggtggaggcatattgccatatcgtcaacagtgattttgccaccggcccgatcccgtggatgctggagaatccggctcgatcattcctgccgaagctgtggcgcaacttcaatcacaccttcaacccgtgtgactatggcggctatatcccggagggtgaagagatgcacccggactaccctggtgtcattcctgaacgtgacgcctacaccaagctgaccgggatctggtgcagtgaagcgttcgtgatgcccgagccgaagccggttgagccagtaggcaaggatttcaaccgggcgatcaaggtcggcggaaagagcacccgcaccaagaacatccgcagcgccactccgcgaggcttcgcgctggctgtattcgaggcaaaccaccgtgcataagttcattatgacactggaagattaccggatgtttgccactcgtgaagaacaccgcgtgatcagcgttgaagagccgccgcttggtgatgcctgtatatcgtgcgagggacgccttgatattcacgtacaggtgatctcctgtcgtgagtggacgttaggcgggcagttgttttatgtgagcaaaatcaaatatcggtcaaataccccaaagggagcgaaatgaaagacgaagcagacaaagtgtctatcgacgcgttcgacgcagaccacaacccggcgctgcacgcggaagccgcagcaaaaggactgaccccgtggcaactgttcagtaaccgcgtatgggcgacgaaggggctggtgactggtgggcactaccaggctgttcgcccgcagaaagtgaccggccgccggttcaacgggagtaagaccccggacaacgtccgcccgaactggcgcaccccggagcacatctttgcatggctggacatgacttacggcccgttcgaggtagaccttgcggcctgcgagaagtcgacgaaatgcgacttctacttttgcaaggaagagaacagccttgcgcaagactggagccagtttgacgcgatgtttctgaacccgccttatgacgacatcacgccgtggactgagaagagccgcgagatcaagccgggcgcagtgctggcggtggtgctgccgaacgacaacagcacggtgtggttccgcaacatggttgatcaggcctacaccatcatcaatatcgtcagcaacggcaagaactcaggccgcctgtcattcgaacacgctggcaccgggaagccaggaaagcagaacaacaaaggcaccgtgctgttcatcctgcgcgggcgtaagcgtcgcgccggtgtggagacgctctacatcgatcaggatcaaatgctgcgcgaattggggttactggatgcacagtaaggcgcaggtctggcaggccgcgaaggagtgcggcctcgacgaattcattaccgccgtttcaaaagcatttcccggcgcgattgacggcgtggcgatatctgcgaaagggatcggtgttctggcgactgacgaccgcatgctgcgcagactggtgagggttaaaccgggcgtgacgctcacaaagcaacaggtcaaggagataaggacgaaatctggtgttactatgcgatataaaggggaaaattgaggagtagcaccgatgggtaagacgtacccgaggcacaatgcccgcactgtatcacgggctgacaggctgcgcaggatgaaccaagataagaacacgcgagtcatcaccaaatacatcgccgggacactagcccggccaccagaaggagaagatcatgacgttagcacaggcaatcttgaaggcatcaaccgaagggcgagatcttaaagtaggaaagggcgtagatcgtgagaacaagcacataggcccgcgaaacggtaagttctggactgacgaacgcattcaggaagtgaccgacgacgtcaccgttcggcggatgacgaaggcgcagattatggagaagcacaacatcactgaaagcggtttttacaacgcctgctaccgttttgggatcccgacaacaaaatgaaaaaacataccgttattcatatcgacacggctgaatttcataatgccgtctacatccttggtcgtgaagagaagatctataactggaaccagaacgtcgagttccgcaaacgccttgttggcctactgggggagattgcagcagcgaagcacctgaacaacatttacggccgccaccggatcatcatcccgatgggagtcaacgcgcgcaccggcgtttcggttaatgcgttcggccatggtgacatcatgaccatctcacgcacagggacgcgcgaacggcaaacgcacgtctatgaggtgaaatccaccgagggcatcggcaagcagttgccaaccatccggcaggacaaagctgaaagctacgtgatgaacggcgttgatgcaatcattctggtggcggtgcatatcaacaaggcgaaggcagagtgccggatcatgcagcaggtatcgcctgttgaagtgatcgagaagtggaggccgatggttaaccggtacggtcaggagtgttatgctttcaactaaatagactttgagattatcatggcccccgttaacactaacgggggcttttcttttgggcgacttcttccacggcatcaccgacatctatcggatgtataagaccgacttagattaccccatcgctgcggccgtcatggctacattgcgtcacatccagctcggtcacgaaaggcgacagatctggactaatgcgatcatggcggcaatgttcgcgaagggcatcacctttatcatcaacatcatcggggattccgttccgcgaatgcactggatcgcaaaccaggatgcaggctggatcgttgcctgcgtgcttgggtacgttgggatcgacaaggtcattcgcgtggttgagcggtatttcccgtccatgaatctcagggggaaaaaatgatcggcaaccttaaaatttacctgctggcggcacttgccgcctttttgctatggcagggcggcagctatgcactgagcaggtacggcgaaagccggtatgaaagcggcgttacagctgggattaacaaggaggctgaacgcagaaacaaaattgaccgtgatctggccgaaatgcgccagagggagaaagaccaagatgatcgcgacacgactcgccggattgaccaagcacgcgctgacgctgctagtgctgcttatgctgctgacaggctgcgccagcaactcaacgcagctactgccatcgcaaaacaacgcgcctccgctgtcggcgttagcagtgatgccggaacgctcgccgatctgctcgccgagctgttctatcagtcagtgcaagcgggtaacgaactggcagcagaagctgatcgatactacatcgccgggcagcgctgcaacacccagtacaaccgactattgcaagcaacaaggagtaacaaatgaggatgagtgacaacgggctgcaatttacagcagcctgggaggaattccgcagcgcgccttacttcgccaccgaagacgagcgccgtcgcgggatctacacctggggcttcgggcacactggccgcaaccctccacgcatcaacatcacgcgagaagccgcgctggcgatcctgcgtgaagacgtagcctatgctgagaagaaggtgaacgagtgggcacataagtccatcacgcaacccatcttcgacgcactggttgatctggtcatcaatgccggtgaagagccaatcaagccggacaagaaggcgggagacttcgacgacctggtgacgcaaggtcgctgggatgagctgatcgttcagctggagttcttccgcaagcagggcggcaagatcattcccgggctggttcgccgggcactggcgcggcaggcgctggcgaaggggatgaactggcgtgatgctgaggccgttggccggaacgcgaaggtgtaaaaaacaaggggccaaatggccccctgtttttagttcagaacaatgaaactcaacagcagatagccaggtgcgtattcgccaacgttggcgatgtgagtcacctcaaccctgatcacccttcctgtgtatccgccgatctccgtccactccctcaacatcagggtgtcgccctcagcgtaatcccggtcgaacttccttaactccgctcgttttttaccagaaacagccgcgttaaagtgaaccgggaggattttaagatcgtggatcacttcatccctcccacgacctcagcgccgatagccgcgtacccagcgaggtcttcgaacgagtcggtgttgtcgtcagtctgagcgcggcagatctttaaaatggattgtagcgtcaccacgtccaggccagtcagcggcatgttctggcggttcgcagacgaacgcacgatattgaatgcgtcagctacgcggtcgaactggcgctctttgccgttctccgcgccgtagcggcgaccgcgctcctcaaggtggccctttaccttctcaagaacctgggaggcgtcaagaggctcagaggagcttttaggggcatcggccttttcggcgaccatgtagatcgcggttccatccgtgcgagcacaatcgcggtttagtgtcgcgatgttgtcgtgagttagcgccgactcatcagctacgccgtggtggcggaagaagttggtcgggaattcgatcacgttagggatagaatattcaccgtgatctaccaggcaatgccagcgggcgatgatggtttcctgcccggaaagctcaccgtagccgatgaacgtcaccagcgagttgcggcccggaatgttgctgccgcgcagaggctcgttgccttcatccacttcgtaccagaagcgcaggatgtcaccagcagtgaagcggtcggtaacgtcagttgtttttttcttcttggtggtcatgttcatttcctcagcattgcattagtgttttgcgccagtcggcgctttcgagatcgacgtagcctagcagaacaggcaccccttctgaactccaaaattcagaacggtgattcacgaacggctctatgtcgtaggcatatagcgcgccatccatatccaccgccacccaattcgcccagcgcggcacggttatgaccatgccgttatagttgaataccttaaacagcccgttagtgatcagcttcataatcatccccaaagtatggaacgcgcgggtaggtcactggtgcataggcctcgatcctgaaatcgcggtttctgtcgagcggctggtagaatgaactgaactccgggtgaatgccttcctggcaccagccgacgaagaagaacggttcaccgccttcatctgtgcggccgtcccagcacgccagctgttcatcggtgtacccgcattcgtcgaaattaacgtaccagaagcggcggatcaggcggcagttgttacgcagacgcaccaccacccaaaactccatttcatgcccgtgctcaatgtccggggtgtcgcccaaagaccagactgacggcaagaattgttcgaatactggctctttctgtttcatttgcaaaaatcctctacgttgatgaagtcgggggtcataaccatgtttcccgcccgtaggaagctcaggccgaagcggtggatcagcgtgctgcactggtcgatgtcgctgtagtgcatgcgacgccagaatcctttcagtgtcccgacgtcgtcccagcgcacttgcgggcggtcgatgaactcagcgcggacgaaccggccatagtgccaaacccattgcccgggcttcacgtcggcgacctccacgagcttagtggggaataccgggatcttgctcatcgtgctttcacctcgccgtagtatccaacgtccatcaggtcggacacgaccgcgatgacctgcgccttcgcctcatcatctgccttgttgttggcaatggccttcatcactgcgctgcgggtgacgtcgaacatcggttcggacacgttacccttgcggtagcgctcacccagcttgcaggcgtccttcatgaccttatccatctgcgcgttatccggcaggcggtcgtatacacccaggtcgcgctggatattgatgttcttgatgccaacggcgcagctaacggcgctggcgtccccgacgtatgagcagcccagcacggcggctgcggcgatggcgatggcggtgatgcgtttcatcggttactccttgtttccacggatggcggcgatggtttcaatgtggcgacgctcttctatgcggcggcgctcttcttcggcggcgatgttgcgcatcaccagcagaaacaggatcgccagcagcggagatatcagcagcgccagcagcgaccaaccaaggccactgcgtccgcgacgatcggcagcgatacccaccagcacagccatgacacaccaaataattaacacgctcatgattctctctcctgttagtcccggcaccctgccgggatctgcatattagtacgggataatatcccgtgtcaacactatagaatgattccagcgccgtgagtgtaaacggtggcgatcgtcagcaactcaaggcgcagcgacttcaacgccccggcggcggtctttgcgtcgatctcggtgacgtggttctttgagtcggtataagacgccttaaagcggttgtgcccgtaggcgatgcagcgcacgcggccgaactcgacgacgacacggtaggtcttctccttcgtcttgtcgttgatagcctcaataacgccgaacctcgcgccgttcaggataagcgagcagatgtgagcgccaatctcgcgggcttcgtcgtggctggtgatcttctttagctggtcaatcattgcgggcctcctttcggcctgcgggcgtgatctcgcacgccccggtagttatgttccactttgccagcccacggctgacaagtccgttcagcgcggtgacggtatgtgacttgctgtcgtatacccaatcgcctgcgcaccattcagagatagcgagccgctttaatacggcccgctgcctgatacgcagcttcactccgggcgacccccggcagccagccatgcagcgtaagcgatggagcgggtcagatcgcacttcatggtgatcttgcggtcttcatcggcgttgacccactgcgagaacgtaagattcagaggcataggctcaccctcagcggctgcgagcgcatggtgatagctgttcagcgacagcagcagggagacgcgctgccgggcagtcatttcacgcatgatcgcccgcacgcacatggaggcgctccccgccccttcatgcttgcgctgtcggccatcccaaaacttgaacgtcattgacagcggtggtcttttacgtccgtccataatttcctcctgttatgatatatattcgacggtttcaggaatgatcgcagcatatttgcagcgttttagcgctggtatgtaccagaaagaaaacatccgttcttcgcctgagctgtcgtcaatgtcaacgtgacacaaagacgcctcatagacgatcccactggcagcggtgacgcgaactcttgggtagacgatccccttccatgcgccatcaattcccttcatgaacttgttggcggcttcgtctgcgcgaatgaacgacggttggtcgtggtaagggaagaaagcgacctcagcgccattaacgacgacggtgacgcatttactcataggctcctccggttgtggcccccgaaggggccggttgtttcagcagatatggtcaacaatatttatcagaaaggcagttcgctatcgatccccgtcacccgtgggcgggccatcatctcaaggtattccttttgtgcctgctcctgtgccagttttgtgagacggcgcacgctgaccatcatcttaacgatgaagcgggccgggtaacgatcgagggcaagcagatcctggcgaacgcggtcaacggcacgctgtacgccgatgtgcatcaggtagccgttgtgagagtagtggcgggcacactgaacagcgcggtcaacgatgccattaacttccagcgcttcggcgtgtgcttcctggcgggctgcgtaggcgcgctggccttcaacggcgtccagcagtttagccagaagcgctttcacgtcgcacagactggcgttagctttccactctgcctggttccagtcgtcgaggttagcggagatgtaaccttctacagcctgctgcatatcgtcgtacatcgtatcgtcaagggtgtcgacgttttcgcagatcagcgcgttcgctgcggagtcgatgatcaggcaggccagcaggtcggcattcttgaactggccgcgggcttgctcgttggtcatccagcttgccggattgccgatggtcagatccagcgcggcgagaatttcgttagcggcggtaagatatttgatagctgacttagacattttgcgaccccttgtgatttatcggttagttactgcctgttcgataaatatattataggggccgcatcatgtcaatagtgcttacactactccttaatgaattctttgaaatctgcggacgatgtctcgcgccacgtcatcagtctgccgttaatgatcgcgtgacgctcgcagttgtaatcgtccctgaatttcagaatggtcatggtgttcaggccggtcttggtggtcagcttgcgcatgctgcccgctttagcgagaagcgcggggatgcttgtaacgtggcaaatcaggctcatgttgttttcctcagtggttatcacggcagctacccatcagcgggggaacggcatctttgatcgtgtagtaagggttacgggcttcatgtgggttagactctttgctcaggtgtcccagctcagccattttgtaaattgcgtcgcgcactgactcccgggaatacggcgtcccgtcagccttaaacaccgtggagctgatacggtgcaggatctccttgtatggcgctgttccgtgcggctctgccctcagcagcgaatacacagcctcctgcaatggcgtgtacacgtgcgcctgacgcttctcttccggttcaaagtgctcttcctctgaaccggcgtccatatcgtaaacgcggtcttcgaacagccagaccttcgtcgcgtcgtcgatgtagatgaagtctggccggtcgacctcctgccctggggcaagtttcttctcatacgtgctttttttcttcgcctcaacgtccttcgcgaacaccggcacctgaaagcctttgagcttaaagcgccccttcaaaccaccctggcggctcttgccgacgttcaggacggtgtagcctgtctccttctggcgggcgttcaatcccttgccggtctgtgtcttctcgcgcaccaggctgaacgttttatacaccgcgcccttcgctgcggatccgccacgagactcaagatcatactggccggacatcaggcttcccttgctgacgtgcgggatgaagatcccggcgcagttgagtgactcagcgaaccggtgcccggcagtggtgatcagctgctggtcggtgttgctgttttcgtccatgctcacgccgttattgttggccgccgccaggtggaacattttgctgtcgaagatgaccagattcaccggcctgccgttggcgaactgcaacacgcggctcttctggatgcgcaactttcctggctccatcaggtcggccgggcgcttgaacaccttgatccagtcacggagattgacgccggtgcgcagcgaccaggcggccacctgcaactcaacgctgtccgggtcttcggtgaagaacacgctgacgcccgggttacacacgcggaagcagttgaacagcgggcgacccatggcgaggctgaccgccatttgcaccagcagcgtcgttttccctgcgcctgcatcaccgttgatctcgttgatggttcggcggttcagcagaccttcgatcaccgggtcgtagaagtccggcgaggtgttcagcacgtattcgcccgggtcgtaatctttcagcgctggatcttcgacaagtccctgctcaacctcttcggcgagacgctttgccacctcaacgcgctgggcggataagtccatgccgagattctgcttttcattctcctcgcgaacgatgcgttgcagctcaaggtggcgctgaccggcgtctttcttcttcggcttaggtggttcaggtggaacaggtggcgctacttcttccgcctgttcacgctcctccacctcagcacgtgctacctggtcgaagtaagcctgcatgtcggccatttcctgcgaataggcttcgtcctcttcctcgcgggtcattggctggttgaggatgtccgccgcttcgtgctgtttctcctgatctcccagtaacgccttccagtcgtcgggcgtcatcggccttttgttctcttcgttcatcgtttcctcctgctttggttcggacattattcacggcaggtaataccgcgtcaacagcgattactttccacctgaaatcagggcggtttttgcgtgtttatacagtatgtaaacaatgctgagggggactcccccgtatcaatattatatttccaagctaaatcaagaggatggcaaaaagttatcaacagaacacctgtacacaaattgagcacataaaacgcgtatacagtaccggcaacagctcaggcggaggtgttctgccgtgcttcgaacggtgaaaatactaagttattgaatcgcaatgattaattcaggtggccggttaaaaatgctcaatacctgacgattgcaagtagctgatatgaaagggttaatttcgggtgttaggtggtatccctattatatataaaacccatataattacagaaacacgtacacccttacgcac

SEQ ID NO: 71 - DNA, 48028 bp, unidentified
  source 1..48028: mol_type = genomic DNA
atgggggaagaaaaaagcgctacgcagtggctgcgcgtttttattctccccaccatgccgtataggggtaaactgaggcagagccacttgaaagaggaaaccaacatgactgataaggtgaaggtaacgacaccccggaacccagtcggcagaccaaccagctacaccgaggacatgccggaaaaactccttgaatatttccgtgtcgacgttgatgactatatccagcactcacacacgacagccgggaaaagcaacattcgcattaacccgaagcacatgccgtctattctcaacttctgcgaaagcatcggcatcacgacgacgacttttcacgactggcgttcgaagcataaggaattttctgtcgcttacacgcaggcgcgcgagctttacgagcagatgattctgaatattggcttcgccacgaacagcactttcgcgaccttcatgctgaaagcgaacttcggctatcgcgacaacactgagatcgtcgtgaccggtgacgccaacaagccggtgcggttgaagatcgtcagcgagcggccgaaagatgagaagccgcgcgaggagtccgaagccgtcgactggggtgacgactaaatactgcttgacatatctatgactgcgcaggaatatgggggccgggcaatcctgccctcactgcacaggacatcaaaatgactgaatcactgaaattcacctccccggcaccggcaccagttagcggcgttctcgcttgcgcttccagcgaggcaggcgcagaaaacaatctcaagctggcgcgcgccatcgtagtcgaggtcgcagaccgtggcgctgagcagcacgtgaaaatcaaagtcggcaccctgcttgccctggcgctgggccttgagggcgtcatgaaggttatggcatcgcttgaggctgatcgcgacagcaagatcaaggcgctcagcgagtgggaggtgttcggcgtcgaaatgcttgagcagaagttcaagtgcctgccggtggtcaacatgaagccggaagagaagcgtaagcgcattgccgctggtatcgacacgctaacgcagcgactcgacgagcgcagcgaagacctggctttagtagatggacagctgaatgaatggcgcacgcacacccggcacatcctggatacctacttcgccacctaccccaccagcaactccaacgaccggaatcttcgcctaatcatgaaggcggcgatcgaaagcgcgcacaacaaaaacaagcagctgaacaatgactataacgccatgcacaacagagcctacgaatcagaccagctgcggaaggcagcagagcgggagcgggacgacgtgatcaacctcaaccgcaacgcagcggaagagatcacccacttgcaagaacgcgccaaacacctcgatcaaaccatcgtcgacctggtgcgccagcgcgacaagaacggccagcagactaaccagctggctaacgaactggtcgagaaacgcaaggagatcagcaggctgttagaaatcattgaccgcctgcacgcagagatcgcagagaagcgcgacatcatcggcgcagcaacgctgcgctgcactgcgctcaccaatgacgcgaaggcgatgagcaagcagaacagcgacctcgcagcacgcctggctaacgctggtctggagatcggcagctataagcagctcgtggaagacctgaaagcaggcaccgcctttgaccgtggcaccgtgaagcgccaggcggacaccattgatcgcctgtatggtcagctcaatgagtggcacgactgggctacagacgtcatttgtagcccgtcatcactgggcggtgaggcgcagcgtacagccatcaccgcagcgatgcgcaagcgcaaggagcgcattgagtcactggagcagatcgtgaaggatgtcgttgcacagcgtgacgcgtgggttatttgggcgcgcgggtacaccaacgcaccgacaggcatgcacagcaccgaacaacttctctcgatggtgaaggcgaaagtgaaggcgatcacagagggcgtcgacgggccagcggagcacaccatgtgcggcacgatgaaagtcacccaactgaaaggggatgtcgttgccagcaatggaggctgggccatgctcaaacacggcaacgcggtgatcgccggaaacattcccgccagcaagctgaccctgggcgaggagatgaaagaggccattcgcgaagtcgtccgggaggagatgagcagcgcgttaaagcaggccatcaagaacgaacttgataagctgaccatgtaacccatcaaatcattaaccagcggcccacgacgggccgcaatgaggtgaaccaatgcagaccttctacccagtctttagcgccattctgtgcatgttttgttttctctgctgcaaagggtgggcgacggccctggatatcggagccgggaaagacaagcgcatgatcaggatggctcgcaccttcgacatcgctggcgacgtgttccgctgggcgtgctggctgttcatcgtcgcgggcttccttcgcaccctcggattgttctgattgcttacactttgtaccatttgcccggttgatcaccgaagtgactgactgataggctttaatgagactcgcagcgaggtggaaatgatggggatcgtaatgggtgtgtggttggcgctggtgacagctatcgcgatgatcgcaattcacatggccgcaattgacagggagctgctcaaggccaacccggtcagccagatcaccaagctggtgctcgcggtcttcctcctggtcggtgtagcgcacatcgccaccaggtacacagctttcctccgcgtgctatcctgacctgacaactgctatcatggccccgttaacaaaacggggcttttttatgtctatccaatctgacgccagtcaattcattgacctgacactcacaccaccgcagaacgactttctgcaactgtcgtgcaaacacccggccttcgtggcgggcttcggtacaggcaagagtcagaccatggccgtgtcgtccgtgcttgacgcctcagagggtggtgcagatgcaacgatcgccatccttgagccaacgttcgacctgtgcaagctgatcgccgtgccgcgtatcgaacagatcctctccgagctgggcattcgctttaagaccgtcggcaacaaggagatctacacctcccacggcgggatcggcgacttcctctttcgctccatggacaacccggctcgcctggtcggctgggaggcgttccgcatccactgcgatgagatcgacaccctcaagaaagaggccgccaaaggggtatggcgcgcagcaatcgcccgctgccgtcagtcaccgaaggagtacgagccgttcgacttccttccgtcagaccgcccgctgaacagggttagcgcctactgcacgccagaggggttcaacttcctgtatggccgctgggcgaaggacaaggagcgcagccgaaaggccggttatctcatgatccaggccgccacctcatccaacccattcctgcctgccgactacctggacgccctgcgcgccagctacgacccgcagcgcttcgaggcctacgcgaaggggcagttcgttaacctgaaatcggggacggtctataagaactttaagcgcgagctgaatgacaccgacgtggagatcataccgggcgagacgctgatcgtcggccaggatttcaacgttaacaagatggcgacagtcgtctacgtcgagcgctatggcgaggacgggcttgccgaactgcatgcagtggatgagcgacacaacggcatcgacacaccggacgtcatccgctggctggtcgagaagtaccagaactcgggaaatggctacatccacccgatcgaggtctacccggatgcgtcaggcggcaacaccagcagcaagaacgccagcatgtcagacctgtcgatgctcatgagcgcagggttcgacgtctactgtgggcaggccaaccctgccgtgaaggacagggtgatcagcgcgaacaccctgttctgcaacgccagcggccgccgtcggctattcgtgagcagcaagcgctgcccgcaattcgtcgaatgtctggagcagcagatctacgatgacaagggcaagcctgacaaggaggccgggaaggatcacatgaacgacgcaggcacctacccggtggtctataagttccctgtcgtgcataatggcacgatctcagcaaataatattgaatgggtacgatgatatgacgatcacgacactgccgcaggcggggacggtatccaccgaacacccgctttacaagcggtttaaccaggaataccgcactatcgaggactgcgttgcaggacagacggtcatcaagcgtgccggtgttctgtacctgccgaagcccgaagcgtggacaatgaagcgttacaacgcgtacaagcgccgcgcccacttcctcaacgccacctatcgcacgcagatgggtatggtcggcatcgcgttcgccaaaccggccacctacaccttgccgactgccatcagctacctgtcgaccgacatcgacggagaagggctggacatggatcagctcgttcgaatgtgcgtagcgcagaacatcaccttcgggcgaggtgggctgctggttgattatgacgccccggaggacgtcgggcaggtgacgacgctggtcaatagtggccgcgcgactatccgcatgttcgaccaccggcagatcatcaactggcgcaagagcggcggcaaatattcgctcatcgtgctgcgctacatggacgacgtcgactacgacggctttgagcactatcaggtggttcgctaccttgaactgcggctggtggatggcaaggcatattcccgcctgtggacggacgaactacagggtgccgccgggctgccttcctcggtcattcagcagaacgggaacatgaaccaggagcagcctgaactgcgcccgatcatggcccgcggaaagcagctcgactatctgcctttctgctggttcggcagcgagaagaacgacagcgacattgacccggctccgctgtccgacatcgcgaacaccaatatcgcccactacaacgccgacgccgacaacaccgacagctcgtttatctgcggccagccgaccttcgtgatcgccggtgtaccgcagaacttccagaaggacaatccgagcataaaggtcggcggtgacgaagcgatcattctgcaatccatgggcaccggcacgcctaccgccagtatggttgttgcaccaccgaacaccccggccgccgcgctgctggagaagcgtgagaagcagcttgccatgctgggcgcgaagctggttgagcgcaacggggctacgaagaccgccacccaggctggcgcggatgagaaaaccgacaactcgatcctctcccagtgcgtcggcaacgtcgaggcggcgttcaatcaggcgatggagatggttaaagacttcactggcaccgaaggcgcgaacgtccacatcaacaagcgatacgaagatatcgtgctgaacccgaccgaactgacagcctacatggcggcggtgcagtcagggatgatgcgtatgatcgacttcctcgcgtggcagcagcgtatcggcctgatcccgaacgacgcagatctggaagacgttgaacaggagctgaaagacggtgccgaagaaacgcagctgatcttcaacgcggctgctcgccagacccagcaggggctggacaacccgcaggaagataaagacccggaggaagataaagacccggaggaagacaagccgatctccaagaagaaggccagcgcgccgaagaaggaggctaaatgacatccgttaactcgcggatggcgtcggaggcggtaaggcaccgcctctacctctaccgctacagcgaaggccaggcgaagaagatgacccagctactgcgccgaatgtccgtggacgtggtcggccgcctgctgtacgcgctggacgactcaaagatctccgccgacaactacacggtgaagcgtcttgaggccatcaaagcagccattaacccgacgatcaaccgcatctacaaaaccacctacggacagctcaaagccgaccttgaggcgctgagtaacggcgagctggcgtaccagtaccgcacgtggcgaacgctcatccctaacccggtgcttgacttcgtgggcgggctggtggagatccctgagactcaggtatgggcagcggcgaacagtcgcccgttccagggcatgcttcttcgtgacatcccgtcagtgctgggcgatgccatgaccgactcgatcggtcgggcggtgcagcagggcattctacagggcgagacgtatgaccagatcattcgccgggtcaaaggcagtgcggcagcggcctacaaagacggggtgatcggcaccaacgagcgccaccttgccaccgtcacccgcagcgcagtgtcgcacgtcgcagctgaggcgcgggacaagatcggcgaggcgaacgcaccgctcatcaagtcagaacagtggctgtctacgctggacaataagacgtcgaagctgtgcatcatccgcgatcagctgctgtacatgcgggacaagaagcacacaccgatcggccatagcgtgccctacggtgctggccctgggcggctgcacatgaactgccgtagtacgtcgaccttcgtgttcaagagctgggaggaattgggcgttccgggagtcaagatcaagggagcgtcgcgcgccagcatgaacggacaggtgccgatttacatggactattcgagctgggtggagcgccagcctatgagcacgttaacgcaggtgtttggcgtggagcgtgcgcagctcatccgcgacggcaagatctcaccgcctgacctgttcaacgacaagggggagtatttaacactctcccagcttcgcgaccttgaccacatcccggcagaagactaacatcgtgccgttgacaacacaggagctatcacatgtggaaatatctgattaacaaagaagcgtttgacgccctctcccctgagcagcaggccgcatacaaggcagtcggtgattctggcaactatgtgatgaacatcgaaggcatgcctgacgtgcaggccatgcagcagcagatggccgatcttcaaacccgcctgggcaccatcgacgcagagaaggccgccgaagcagagaaggcccgacaggcagcgcttgacctggcgaagaagaacggcgactttaagaccatcgaagaggactataagcgccagatcgccgacctgaacggcaagatcgagggcttcggcaagcagcgccgcgaagacttcctgaacgcgcagatcgataagctggccgcagagctgggtggcaaggagtatgccgcgctgttcaaaccggcgttgcagcagcgcctgtctgtcgagggtggtgaagatggctccgacttcatccctcgcgtgctgaaagacggcaagccgtcggcgatgtcactgaacgacctgatcggcgagttccgggcagacccgacttacaagccggtgtgcgtagcgcctgcatcctctggcactggccgccatcaggcacctaccccgacgccttctgcttccgacaagctcccgagcattgacgacgtgcgcggtaagcagctgagccgcgcagaacagatcgcggcaagtatcagcgacgcagagtaagtaagtacaggcccggcattgccgggctttttcttgcttgtccagtagttgccggttatcatccagacgtttaatcactcaaaggacatcgcgcgatgagctttactatcttccaacgaaaactgatcggtacgaccgttcagcttctgactgaaaacctgaacgtgttcaacgaggcttccggtggcaccatgcttatcggcagcggcgaggttatcaaggaaaccatggagaaaatgaccattgggatcattgatggtctggttcaggatcgcaacgaacacgcccccgttaacactgtggttcagccgaaggtgctttcccgcatcctgggcggttccatcaactccgctggccgccttgggccggtagccatcacctccggccagctgcgactgatcgagactgacgtgaaccgcgcggcagccgagatcgcaaccctcgcgtcggaagccatgctgaaacgctacgtgacagtggcaatgggtgctggcgtggctgcgatcgaagcgttcggtcagggtatctatacccaggacgctcacatgaccagcaaggccggtgaactgtatccgaccgttgaagacttcccgctggcggcgtccatcttcggcgaccaggccgacctgattcgcacctggttcatgtccggcacccagtgggcgaagttctccgcccgtgaagcggtcaagtccgccaagctggtatttgagctgggcaacatgaagatcttcaccgatggcttcggtcgttcgttcgtggtatccgacgcggcaagcgctggcatctctgcggcgacctccggcggctccgcgatctacgcacctgatcatgcgattgttggtctggccgccaacgccatccaggtaacgaccaccggcctcaaaatggctgctgacccggccaagctgggcggcgagaacattgaaagctggtggcaaggtgagtttaactacagcattgctctcaaaggcatgcgtcctaccatggcgttccgcaccgccaccgaaggcaagaagactccgaccatggccgacctggtcaagaaagagaactgggaagccgagaagggcgaaaccgaccgtaagccggttggcaatgacgccgatccggtggtgccgactcgcaacgtgcgcgagacgctggggatcatcatgaagttgaccccaactaccatcccggcagaccacgctggtgtgtaagcgaagaagtgaataatatgggggccgattggcccccttttcattggagcaaaatatgatcggcaatctggacgacctgaaagcattcgctgcggccaacggctatacgggcatgaccgacgaggagctgagcaccgcgctccgccaggctaacctatggctgtggtcactgtcatggaatggcgagcaggctgaacccggccaggcggacatttggccgcgcactatctgcgacgactacaactgtctcgactacgacaccccgccggaagtcctccgctttacttacaccatcgtgtgcgacgccgtcgactctggaacggagttcaacaccgcatcggctggcgcgtataagaaacgcacccggatcgagggcgctatagatgtcgagtacagcgagcagagcctatacagcgcaggcttcgaggcaccctacatgatgggcatgatcgggcactggctggaaggcaacgggcgcggctgtaacgtcaagatggagcgcggataatgaacaagctatatcgtgaactgcgggcagaggcccgcaagctgttcaaagagtacggcgcagtcatcaccatcagcactcctggcggaatcagccgcgacccagtcaccggcgaggaagtggtgacgccgccgggcgcggtatgcaaggtgctgggcgtgatcaccggcgtcgacctcaagttttgggggctggcgaccatcccgccgggcgagcagcagatcgtcatggcatggacggacaccaccgggaaggagtgggagccgaagatgaatatgaccgtctcaggtggtggccgcacgtactccatcaccgagattaagccggttatcccagacggtggctacggcatcgtgtacaagctgaggatcaaggggctgtaatggcaagcaagcggaacgggacaatctttgccaacaatgtcgctcagtgggctggtggggtcgtcgagcgtcacgaagagatcgtgcagctggcggcgatgaaggtcttcgcaatgatcatccagcgctcgcccgtcggcaaccctgacctgtggaaccgcaaccagcaggccgtcaaggagcgcaaccgcatgagcgacctacgaacggccatgcgcgaaagcgacaccttcggctacacgaccaagcgcggcacccgccgactcaagccgggcgcgaacatcgttgcagcaccggcgaaattctcttcccctgtcgggccagtcggcccgcgcattccgcgacttctcaagaatgagcagggcgtcaacccggtcgggaagggctacgtcggcggccggttccgggctaactggcaggtggggatcgactttgtccctattgagtggctggatgaacgggacaagtcaggcaccccgaccatcaacaaaatggtgaacgccgtcgagcgcttccgcgtcgggatggctgagcatatttatttcgttaacaattcgccgtatggctacccgctggaatatgaggggcactcacgacaggctcccgccgggatggtcaggatctcatgtatccaatttgaggaagcattcgcggcagcaacagcagaggcacaaaaattatgatcagcacttcacagattcaggcaaaattcgacctaatcgcaatgcagtgggggaataacaacaatatcgccctcgtgtggcgtaacagcgccgataacgacatgaacgagcaggcagtgagtcagctggtcggcttcccgcagcacatcccggccccgtctatctccatgggcttccagcagtcagacatagcgaagcgcgggatctaccaggttatgctgcgtgctcctcgcctttccggcacccgtcagatctacgacgcggccgacgcgctggtggaggcgttcaatgaagcgatgttctatgacggtaattatgttagcatcggcgacgatgatcggcagctataccttacggcaccggctgaaatcggcgctgactatgaagacgacgccgggctgcatgtggctgtcacgatgaactaccgtatcaacaacgtaagaggctaacatggctacgaaactctcctacaacatcccgaacggctccacgctgcaaatcgctcagacgatgggcgcaagcattgccatcactggcgtatcaaacgagaaggaggctatcgccaccctgtcagcagctgattctagcctggccgcaggcgactacgtgcagctgtttaccagctgggtcaatatgaatggcctggtgtgtcgcgtgaaatccatcgccaccaataaagtgacgctggagaagatcgacaccaccaacaccgacatttacccggcaggtggtggcgctggtacgttggttaagattcaggcgtggatcgaccttccgctgacccctaccatctccaactccggtaacgagcagcagaccaccacgttccaggctatccagcacgagcgcgcggtgaacatcaacacctacaagtcggcggctacgcagactttcaccatggcgcacaacgccagcctgccggtgcgtgatgtgctgaaaaacctcgaccgcacgcaggacatcaccgcgttcaagttctacaacaagcgcgcgaaggaaacccgcgtttatggctgccaggtctcctttaacgagatcccgacatccgaagtgaacaacgtcgagacgaacagccttgttctgagcctggtcagtgagatggtgatctatcctgccgcgtaaagcgtgctatcatcagggcggcttaggccgcctttttcatatctggagacaagacaatggctgcaaaattcaagttagtacccgctggcacgttcgaacttcctatcctgatcaccaccgtagggcaggatgagcctacagagctgaaattcacgttcaagcgcatgccgctgaccgagctgaaagagaagcaggaagcgatggcgaagcgcgtgcaggagatggatgaggaatacaagggcaaaaagctgtccgtcgtcgaagatagcgtgctgcaatatccgttgatggccgattttgtgctggatatcgcaaccggctgggagctgtccgacaagttcacgaaagagaacctgatcaccctgttcgataactacccgacggcgtttatgtcgatcagcgttggctatcagtccgagttgtggaagctgcgccaaaagcactaaccgccgcgattgagggtctgtatttccccgatccgccgcagcagctggtcgataatttcgggggggagctggaagactaccgtccagaagtggagctatcagcagagattgttgatagcttttatttttaccagcgtattgatacccaatggcgcacggggccgggcggtttaatcggcctcgactacaacgtgatccccgtcatggctaacctgtatggcgtcaagttcgatcgcctgctcatggatgacatggcaatcatggagggggccgcgatcagagttctcatgagcaggagtgatacagcatgagtgaaaacacagaacgcttgatcgtcgacgtcgacgccagcggggtcaacgcgggggccaaatccctcgcagaccttgttgacgcggcgcaggacgcaggaagggcagcggacgggctgggcgacaagttcgaccaggtgaagccgtcagccgactcagcagccgcagcggtcgacaacttcaacaacgaggcgaagcagacgcaggaggctgctggcgacgctgccgtggggctgtaccggcagaatcaggagcttcaaaacctgctcgacagcatcaggccaacgcgcgttcagcttcgtgacctggcgcagcagcaggaggcactggcgaaggcgcaggctaacgggctgctgggcgcgaaggaagcggaggagtacaacgctatcctcgccaaccgtgccgggatcatcgaccgaaacgacgctgctatgcgcggcctgaatgtgacgtctgagaagcagaagacgctacagcaggaattgaccatcactaccgggcaataccgcgctgctatgggtatgttaccggcgcagatgaccgatatcgtcacccagctggcaggtggtcagaatccattcctgatcatgatccagcagggcggccagattaaggactccttcggcgggctgggcaacacctttcaggcgcttaaacaattcatttccccttccttcctcgggctggctggcgcgacagcagccatcgctgcaatgggttatgcagcctacaccagcgcagaccaggccgatcgactcgctgcatcggtgacgctcatgggtggggcaggctttaagtcagccgaagagctgaacagggccgccgtcatgatccagaagtcaactggcgacagcattagcagcatcaccgaccggctgatcgagctgaacaacaagggcacgatgacagccgacatgatggagaaggtggcgatctccacgtcgaagctgtcagatgccgggctggacgctggcgacgtcatgaaagacttcgataatctggtgaagaacccgatcaagtctatcgccgcgctcaatgagcagtatggcttcatgaacgaagcgcagatgaagcacctaatccagacgcagaaggagaagggtgagcaggccgcagccgccgaagcgctggacatctacacaacggccatgaataagcgggccgatgacgtgatcgagaagactgataacgtcggtcaggcatggaagacgctgaaaaccgccgcgtcggatgcctttaacgatatggggatcgtgctgcgctcgtggggaaaccgcgccgtcgacatcttcaaaatggtcaagctatcgatcgacgacctgctgaactatcttgcgcagatggacagcaaatttacgctgggcgttgctgacctgctggacaaggtgccgggcgttgacggccgtggcgttctccgggcaatggggatcgacgtcgaaaccgtcgagaaaaatggccgggagtccatcgagaagggcaagcagatcgcgaaggagttcgcggaggtcagcaagcgggcctttgagagccaggcagacgctgaggcgcgggcgcgcaacgccaacggcgctaccggcagcggtgctaccgatgagaagagcagggaagcggtcagcaagctggcgagtgaggcagcgaagcacaacaaggagaaggccatcaccgtttcacagggtgatcgcatccttgagcagtatcaggcgcaggagctggcattacgggcgcagattaagacgctgaaagaccggaacgccttcgacgtcaacgcctccgaacagatgaagaactatcagctgttagtcgcgaagatctccatccttgagggtatccgggccgacgcaaaaggccgggcgctaaccaaggacgaacagtcgcttctggcgagcaaagaggaaatccttgcaaaagccaagactgtcggactgctgggcgatcaggtcaagcagcttgaacgtcaggcgcagatcaccgatgagctgacccgcagcggcaatgacctgtctgttcaggtggcggccattaacgcctcatggggtctatcagccgatgaggctgcgcggctgctggagaacatgcagcgagcggcggccctccgggacaaaggcgcgactcaggagcaaatcgacgaggacgcacgccagcgtgaagcgctgcggcaggctaccgacgcgaaaacgcaggactgggcaggcggcgcacgctccgcgatcgaagcgtggggtaaggatgccaccaacacctcagccaacgtacagaaggccatcactggcgcaatggatgccgggctggactcgatcaactccttcgtgatgaccggtaaggcgtcgttcgccgactttaccaaatccatccttgggatgatggttcagataatcaacaaatggctaatgttcaaagccatccaggggatcggcggcgcgatgggcttcgatatgtccagcatcggattcaatgcgaagggtggcgtatacgatagcccgtctctgtctgcttacagcaaccgcgtctacaccacgccgcagctgttcacgtatgacaagccgaagccgtttgcgaagggcggggtgttcgccgaagccgggccggaagccatcatgccactggcgaaggattccagcgggcgtcttggtgttcgtgctcagggcggtgctggtggcggcgtctccatcgggtcgatggaagtgaatgtcgaccagaacgggcaggcgacggccaacgtgtcagagtctggcaagctgggccgagcctacggtgatgcaatggccgcagccattcaggacggcatcgcccgtgcaagctcaccgggtggacagatctggatgcttattaacggtcacgcgtgataacctacagcctcccacacaggaggctttttttatggctacattagacgcgtggatctggccgctggcggcaggtcaacaggtatcagtgaaagaccgcagccgatcgaacagcttcggcgacggctcacagcagaacgttttagaaggcatcaatccgttcattatggaggtgccctgctcgtggactggcaacgccaagacaggcaaccagatcctatccttcctgaaagcgcacatcaccaacccgttccagatggttccgccgcatggcgaactgggcctttacaccgtgaaatcaggcacgatcaaatatgtcgcgctgggacgtgcaaccatgaacattaccttcacagccgagcaggccgtgggcatctacacaggggtgaaaggatgagcaacaccattttcgacgaagccacaaagctcgacccgtctggcaagatcattctcatggagatcgacggaaccgagttcggcgcggggatcatccggggccactattgccagctcccgcacacgagcaaggagatcctcgacagcgcgaacagcacactgacccgtgatcagcttttcaactgcaaaagcgccaatactcgcggcaccgtcacgaagaacgaagaccggaacaccatcaactttaagtcgctgggcgtcgactcgaacctggttttacctgagttctctggcggcctgactggtggcaagtatcaggtgatcgaggtggttggtcgctgggtgactccgcctccatcaactgacaaccagtatcagatctactacaaaaccgcagcgcatgatttttccaacagctacaacaagggcggggcgttggcatcagtaacgaaggatcttggtgatggatggctgaaattctcgttcgacatgtcgaagctgagcgctggcggttcagactgggtaaacagccagattatcggcatccgcattgacatgtggcagcaggcagtcggcgagatcgagatcaagcgaatcagcatcctgaacaagaacccgcacgaggttgacgcgtccaagctggcaccgaagtcaatctggttcgacaacgtcgaatatggctattggccgtttatggctgaggggatcgagttcagcagcgagcagcaggggacgcctaccctgtccattggcaaccagtcgggggtcgtcagcgcctacctgcgcgcctatcagcagatggtcggggcaaaggtcaagatcatccagacctacgcgaagttcctcgatccgcgcaacttcacagatggtaacgagttcgccgactcaatgcagcagtggacgcagctttactacatcgatcggccagactatgaaagcgaagagtatgttcggttcgcgctgtcgtcgccgctcgacctacagaactttcaggtgccaacgcgcagcatcacgacgttctgtcagtggcaggcgcgcggtctttacggcaaaggcctggacgccggggaagaaaacgggtgcagctggaaccgtggcacagctaaaaagtggtacgacaagcacgggaaccaggtggacgacatcacgaaggatgagtgcggcgggtgcattcaggattgccgcctacgcttcggtcagctggtgagtgacccgaaagcggctgttctggactacggcggttttatctctgtgcgcctgattgattaaacgcactgtatcgcgttctgcggcgttttcttgcgtaagacgtccgaacgtatggcctgacggcgttaaacgcgacagcgtgccgttcaggcccgcagttttcgactaccgaagataagaatacatcccatagccatatataataaaaaccctcccaagggagttttatttatatggtcttgggtatgtcttatatgtatttatggtaataaatatatatacccataccacctaacacctgaaattcagcattgtaaatcaatggtttaaaatttcaggtggtgccaagtggaggcaaaaatgattgacgtaaacgacatcccggaaaagcaattaacctatattaaacaacaccttacagagtgttcgccgcaagagggctgcgggctgctggtgaattcaggcggaggcctcgaatactggcctgtcatcaactcagcagccgacaaaatgaacagttttcgcattgcaccgcaggaattcgctgaggctgaggacgcaggcaatatcgttgccgtcatccattcacaccctggcgctgacggtctggcgtatccgtcaatcctcgatcgccagctcatgcaggaaacttgcttaccgtggttcatctacgccccggacaaggatgagatggcggtgttctttgaggagccgaaggggctgctgggtcgtgacttcgtgctgggtgcgacagactgctacggcctggtgatggcgtggcaccgttcgcgaggcatccagctccctgacttccgcaagccgtacccgtggtgggagaagggtgaggagcttttcacggatgagaacttttcagcagcgggatttatcaagaaggccgaggcagagccgggcgacatggtggtgttccgtatcgcgtccagcgtaagcaatcactgcgggatctacaccggcgacgggatgattatgcaccacctcatgaaccgcaaatcgaccattgataggatgtttggcacctaccttgagccgcgcattactggtattctccgacatgagttactaccggagatcacaccatgggaaaccagctaagcaccatccgactgtacggcgaaatgggggcgcgcttcgggcgcgtccatcacctcgcggtcgactcctgcgccgaagcgatcagcgccctttccgccatcctccccggattcgatcaatatatgcgtgacagccagtcgcgcggcctgaccttcgctccgttcatcggaaagcggaacatcggcttcaatgagatgtcgcagccaatccctgacggcgaagagttccgcattgccccgatcatcatcggcaacaagaagggcggcctgttccagaccatcctgggcgctgcgatgattgttgctggcgtcgtggcgtcgttcatccccggcgggcaggctgtctccccttacctcgttgctgctggtatctccacggctgctggcggggtcatgcagatgctgtccccccaggcgacaggcatgaagatccgggaggatgacgccaacgcgccgtcatacgccttcggccagccggttaacacgacagcacaaggtaacatcgttggcgttttgtatggcgagcgtgagatcgggggtgctatcatcagcgccggaattatcgctaacgaggtacgttcttaatggaaatcaaaggatacaagggcgggagtagcaacgtgcatacccccgttgaagatccagactccctgatcagcaacgcaacggtaaggatgctcctggcgttgtcagagggtgaaaccgtgccgattagcgcggaagacctgcccaagcgcgtttacatggacgggacgcccgttcagaacgatgacgggtcagtaaacattccgggcgttactctggaatatcgcaacggaaccccgcagcaggagccgatcaacggcttcccggcggtggaaagtgaaacacgaatcaatgtggagctgaaaaagtcttctgcatgggtgcgtaacatcaccaacaccgagatcgacgccgtccgcatccgaatgaatttccggctggtcatccagcagaaggacggggatcgcgtaggcggacgcattgagtaccggattgaataccgcaaagtcggcgacagcgcctacaccgtggccttcaatggtgctgtcgacggcaagcagaaagacaactatgaacgcgatcaccgcattgacctgccgaagagcagcactggctggcaaatccgcgttacccgcctaactgacgacagcacgtcggataccaccgtgctcaactccgggatcgtggctgtcaccgagatcgtcgacgcccgcgttcgttacccgtggacgtccctactgttcgtcagcttcgacgccaaatcgttccagaacatcccgacaatcagcatcaagatgggcggccgtctggtgctggttccgtccaactatgaccctgttaaccacacctacagcgggtcgtggaacgggacatttaaacaggcgtggacggataacccggcgtggatcgtctacgacatcattctgcacaagcgcttcggtattggccgccgtatcccgtcctcattcctgaacaaatggacgatgtacagcatcgcacagcgctgcgatgagctggtgacgaacgccgacggcacgcagaaccgccgttacacctgtaacgtgtatatccagaaacgcgagcatgcgtggatcgtcatccgtgacctggcgtcgatctttaacggaatggtcagctacagcaatatgcaattgcagttcgcgcaggatgcaccggcagaagtccgccatgttgtgacaaacgacgacgtcgtgaacgggacgttcgaatattcctacggcagcatggctaaccgtcgcgggatcgcgatggtcacttttgacgacccgaaggcgcactataagacgcagaccactgtggcgcagatcaaagacctcgtggagcgctatggcgttgagccgctggaagtgtccggcatcggctgcacggacgaatacgaagcgcaacgtcgcggcctgtgggcgctgctgtcgaataccaacgacatgcagatcagctaccgcgtcggcctgagcggcatcaagtacctgatcggcgacgtcgtcggcatcgctaaccgctacgtgcagggcggtcagttcggcgggcgtgttgctggcgcatccggcaccaccattacctccgaccgtatgatctccgaccacgtggcaatcggcgacagagtgatcgttcgtcaagctggatcggatggaacctacaaccgcgtgatcaatgcaatcgcggctgaccggatgtccttcaccgtcgacggcactaaccttgatattcagagcggtgaagtgttcctgctggatactaaggtactggcaccggaactaatccgcatcaccaagatcacctacaacgagcaggacaataatttcaccgttaccggtctgcaatacagccactcgaagtatttgcaggttgacaccggcgcgcgaattgaagaccgcccgacatcgctgatcccgaccggtcaggtacaggcacccgctaacgtggtggccgaaggctacagtatcgttaaccaggggattcgctcagctaacgtaaactgttcatggttcaccgtagatcaggccgtcagctacgacattcaggtgcgccgaacctctcagtcaaacggtcagtggtcacagggttggactaaccttgccagccagtcgagtacgtccgttgacctgacaaacgttctgaccggcacctatcagttccgcgttcgttccgtatcccgtgacggcgggtcgtctcagtgggtcgagtcgaatcaggtgttcgttgacggcaagcgtggcagcatcccggcagtagctggcctgaacggcgtaggcattgttaacgggatcacatggcgttgggtgactggcacagatgatctgatcgatatgaagtcgacagagctacagttccagcgcattgacggcaatggtgctccggttggtgggtggatcgatctcagcgtcgtgacctacccgaccgggacgttcacacagtccggcctgaaattttccgaacgcgtgcaggtgcgcgcccgctttgtgtcgtcatatagcgatgctggcgagtggagcgccccggtcatggcgatgacgtccgacaacatggacgactattaccagaacatcgacgacgcgatcaaaggctccgatacctacggcgaacttaccagcggcatcaaagacgtaagcgacagcgcacaggcagcgaaagacgccgcgcaggccgcgcaggttactgctgacggagcagtgacaaccaaccagcagcagcagcagcagctgaacaaccagctggccgagatccagaagaacgcgcaggccatcaccaccaccgctaacgcgggggcggcaaacgccagtgcaatcgctcaggagatccttgaccgcaaggctggcgacatcgcgaacgccaacaaggcagctcaggacgtggccgacgctatcgcgaaggctgagacggatgacgcagaagtggcagcccatgctgcggctaacctgctggcgacaaaaaacgaagtcgaagcgcagatcagcaccaccaataccacgatgcaggacggcttcgacagtctggctcagcagatggcatccatttccgctggtactggcgagcagttcgacagcctcgctatctggtatttcgacaacggcccggaagggtgggcttctgacgacgccaacaccaatctgctcccagtagaccaagatggctggatttacccagctggcgcagcagccaccatgcgctcaccgaacccgctggcaatcgacgcgcgcagctataagtacatgcgcctgcgcatgaagcgagtcgggaacccgtcatgggctggcaagctgtattggatcggtgttgatgagactggctggacaagtacccgctcgcttgctatcccggcacctgactttgaccctaccaccgggatcactgtcctgtcgctccctgatctcctgtgggcgacatccggcaccgtgcgccgcctgcgctttgacttctcaaacaatcaggacgccaataactactacgcgatcgactggatggcagtcggccgaccgacaccgggcgcgtcacaggcgcagattcaggatcttcgcaccgccatgaccgctgcggactctgccgaagccgcagcgcgtaacacgctggccgtacagcttcgcgggaactatgagggaaccgacccgtccaaactggtgacaggcatcatcttcaacgagcgccagacccgtgtcaccgcagagcaggcgatcgccagcgacgtcaacaccctgcgcactgactacaacgcgaacaaagccgccgtgacccagcgtctcgacacgctgaccagcgagaaccagtctcaggcgcaggcgcttacccagcttcaaagcggcctgaccgacgcgaacgggaagatcacggcgaactccaacgcgatcaccagcctgcaatcgactgtcaccaagcagggcaatacgctgacctctcagggccaggcgattacctcgctaaagaacaccgtcacggaaattaagatcggggcagagaacatcctgctggggtcagaccgcacactgaacccgctcaccatgcggtcttcggcgacgtcgttcacctcgtatgacttccaggtgccggacacgtggaaggcgaaaagcatcagtgctaccacctatttcacgctgtcagtctggtttaagaagtccaacgattacaccatgaaagatccgttcaccagcgccgtgcttggggccgcgagcgcgaccggtgacagctggagcaagcgcttctacatgagcgacggaagcatcgtggaggatggccagtatttccgctatcgcgggacggttacagtggcggccggggcggtactgttcaaaaatccgaacacgctgcgcattatctgtgaggataaggagcggacgaccggctgcgtgctgtacaaaatccagctggaagagggtaaccggggaaccgactgggggccgaacccggacgaagtccagggcagcatcaacaccgccaacgcgagcgctacggcgcttaacgccctgaccacccgcgttactgctgcggaaggcaccatcagcaccaacagccaggcgatcaccaagctcaaaggcgacgtgagcaccttgcagggtcagatggctaccaaggcagaagcgagcgcattgcagcagctggctaccactgtcacccagcaggggaacaccatctcatcgcagggtcaggcgatcaccgacttgcagaacactgcacagaacggtaaagcgaactactggctgaccaagatcttcgacattaaggttaataccggctacgtgccgaagttaacagatctcgcaggcgtgccgccgctggccgtgtacgagatggctgacgctgcaaagctggacttcctgacttacggcgactacaaaatcgcgtatgtgaaggcgctggtgtatgttgcggctgataagaccattgctatctcgcccggttccagaatcatggacgacaccggcaggctgtacatcaatggagcggaagcggcttccttctctaccagcaccagcatctacagcatggcgctcaaaaagggctggaacacgcttgagttcgttgtcgcgcagtacgccggtcagttctatatcaactttggcctaaaactgtccgacaacgtcgatcagctgttcagtggtgccggtcagcttgccgctgcatccgcctcgcaggtgctctcctctcaggttgagcagacctccgggaaggttgacgcgaacagcgccgcgatcgtcactctgaacaactcggtgcgggacatcaacaccgcgctgaacaacaaagctgacgcgaacgcgttgcagtcgctgaccacccgtgtcaccaccgccgaagggaagatcacggcgcagggcaatgcaattacccagctcaccagcgacctgtcgacagcgaacgggaagatctccgctaactcaacggcgatcaataacctgacgacccgggtcagcgcagccgaagggaagattgactcacaggctgagtccatcacctcgatcaaatcatcgatcaatggcgtgctgactcaggcggcgaacctcatcccgaacccgacggtagacccggcctatccgcaaatgggcatgactgttgtttccacaacatcagaaggtgttccggctggatgcccttacccgtgggcgattaaatgccagtaccgcgatcacatcccgggtatggacaacatcccttgtcgcgaaggtcaggtgtttgagttctctgtactggccgcatgcggcaccggctccgcaccattccagcactacatcgggacgtcgactctggtttctggcagcatcgggtcgccacaagcgagcggaggccaaatctcagcggctaccggcgcgcagtggacgcgcaccacgtggcgctggacagtaaacgctgcgcagggggcgaagggttacttccgtccattcctgcaaatcaatcagggcggcccgaacttcgggacagtctggtatgcgaccgactggcaggtgcgcgacgtcaccgcagcggcgaaggccgaaggcaaggccgatgccaacgccacggcgatcagccagctgacaacccgcgttacttctgcggaagggtcgatcacgtctcagggccaggccattaccaaactgaccagcgatctgagcacgctgaccggcatcgtgaacaataaggctgacgcttcggcgctgaatgcgctcactacccgcgtatcgactgccgaaggcaagatcgattcacatggtcagtcgatcacccagctgagcaatagcctgtccgcaactgacgcctcaatcgacgcgcagggcaagatccccgggaacctgctggctaactcatcgtttgagcgcggcccggttaacttcaccggctggagcagccttgccaccatcatcacggcaacgcagccgcactctggcaccaaaattgccaagatggcggcaggcggaagtgctggaatcagccaggctgtggagatcacgcaggggcgtcgctaccgcttcggcgtgtttgccaaacaggacgccgggactgtcatcaacgatccgggtaacacgaaattccgtatcgatgacgcatcaggcaatcttcttgctggcaagaattacggcccgtttacgtctgaatggcaacacgtcttcatggactggacggctacgaagaccaccaacgcgctgtttcagctgactaccgcactgagtgctggcgcgatgtatttcgacgacgtctacgttgtcgacatcaccaacgacaccaagattcaggcgaacgctgacgcgatcacctcgctgaacacgaaagtgacccagcagggtaacgacatcacgtcgcagggcagcgcgatcacccagctgaacaactcgcttaaaactgtgcagtacagcaacagcaatccgtgggtagatggatcgttcgagtcgtatgacaaccagcaagccatcggcggatctaatagcctggtcactactgacttctcattcagtggtcagaagtcgcttatgtgtcgccgcgccaacggtgaaaccggcaactcagataagaacttcggtaatgaaacagcaattcgagagtctgcggtttaccgcttcgaatgctgggcgatgatgccggaagatgagacaccgccgaacgggtggaactgtgttgtgggcttaatggttcgcaacacagctaaccagaacgcatggcctagcgcattagtcatcacagaggcagggcttgctgctggtggcggccgtggtaagtgggtcaagttctccggtaagctcggcttagacggcgcaaagaaaacacgaggtcgcctgtggatctcctgccgtggcacatccggcggccctggatatcgcatctatatcgacgatctggtgatcaccgacgttaccgatgcgcatgcagcacagaccaccgcagacgctaactcaagcgcgatcagcagcctgaccagccgtgtgagcaccacagaagggcagatcacatctcaggcagacgcgatcaccaagctgagcggtgacgttagcaccatcaacggaacgctgagccagaaggctgacgcgacggcgctatctagtctgcaaaataccgtgacccaacagggcaaggatatttcggcatctaacagcagcatcgctaaccttcaggcgtcaatcaatcgccgcaccgtgttcaccgtgacctcaataggccttgggccgagcgtgaaagatggcgtgttcgatgagtcaggaaataaactggttagccctggtcgtagctacacgatgattacctttaaggtaaattctgataactcgacctctatcgacaccagcaagacgtatgacgtttttggttctgccaataacggcaaaacgatgtctgacgacattgcggcgctggctaatggaacttatgtttgtgtgctgacctacgatgagccgtccgcaaaccgtgcgtctattttatccgcaatggagcttttgggtggcacagcggaggtcttgaactctctgccttatcgcggcgcctatatcctgcttggtcgcaagggtatgaaagctggtgacggtctggagttacgtgcgcctactggcggcgcggccgattcgtacatctcaacgtctgttgagtttattaacggcatcatgtcaggtctgggcgctgctggtggtgtaatgatgaaagcggatgcgaacgcatcggctatctctacgctgcaaaacaccgttactcagcagggtaaagacatcacctccgcgagcagccagattactgcattgcagaacgacctgaacacgacaaacagtaatgtcagtaaaaaggctgactcaactgcgctgaccgccctaaccaaccgagtgacgtctgccgagggcagcatcacttcgcaaggtcagagcatcaccagtctacagaacagcatcacctacggcgacaacctggtgcctaaccccggaatgctgggcgatgcacagggctggacgaaggccgggacggagaccatcgacggctatccggcggtgtactccacggcgagctataacccgacgtcggggaaattcccggtcacggagggtgagacgctggatctggcggtgtcggtaatggtcaacatcgcaggcgcgataacagtcgggctgcgtttcgacggcccgagtgtcagcaaccagaccgcgtatgccaccaaccgcaccatgaccgccggggagaaatatcgcttcaccctgacgggcatcacggttccggcaggctgtacgaccgcctacatccaggcggggagccacgccgccacgacccgcgtcagcctgtataacccggtagtgacccgtcggggcgctgggatccaggcgaacgcggccgccatcacctcgctgaactccacggtgacgcagcagggcaaggacattacggcgaacacgaccgccattaccgggctgacgagccgggtggggacggcagaagcgtcggtcaatgccctgaatgagacgacggcggctaacggtctggcgatggcaaacggcttccagcaactgcgtgcgcagatcggcgacaaccaggcagccatcacgcagacgagcaaggcaatggtggatcttgagtcttcaacggcgcagcagatcggcacaatcaaggcgtcagtggatggtatgagttccaccgttcagcagacttcaacggctgttgcggatatcaacggcaagctgtcggcgcagtggggcgtcaaagttcagactgacaccggcggcggaaacccgcgcatagctggcattcagctgggcatcgacgcaactggcagctcacagttcctggttcaggctgacaccttcgcggtgtacgctggcggcagtaacaagacgttcccgttcgtggtgcagaacggcgtggcgtacatgcaggaagcgctgatacgcgacggttcgatcactaacgcgaagatcggtaacgaaatcaggtcgaacaactttgtcgatggctctcagggctggcgcatcggtaaggatggctcttcgcagttcaacaacgttatcgttcgcggtcgtgtcgaggctaatagcggctcattccatggcaccatcgacgcgaccgacgggatctttcgtggctcagtcgaggctaacagcttcgttggtgatattgcggcaatgagcaccttcccttccaaggttgggtcggcctggaaatctcgcatcatgcaccatgactcaagtgcgaagggcggcaaaagctatgctatctgtggcctcatccgctgggatgcgggcgacaagaacggctcggttgtcgtggaatgttatgtgaatggcgttcggttatcgtctcagtcgtataacggccgagacaccggggaatcaacccgcgtgcgcttgactgccgtcggcgttgcaactggcatcggcacgagagacaccttggttgagattgtcgtgagtggaaccggcaccagtacgctggaggctggttactgcgtcatgtctcgcggctcaggctcatgggaagcagtagcataactggaggcggcccctgtgggggccgatattgaatggcaaatattagcgatcagctcgcggctgatattcacaacgcgtttaacaaatactacacagacctggcgaaccaggatcagatcttctttggcgtcggtgatgtgacaatcacgaagcaggacggcaccaccgccactgtgcgctcatggaacaaggtcattggctcagtggacaccgcagcgcagcgcggagctgcgaacaccttcacggccctgcaaacgttcagcgccgggattaatgtttctgtcggcaacatcaacgtgatgaacgacaacagcatggtgatccttgggaaaaatagcgatcttgcgctgcttaaaaagagcggtcagggcggaaccattgccgtcggtagcggtacgccattcaagatccagcgcacgaatacagcaacagtctcaccgtcttctacggtcgaggatattttgaccatcggaacggataagaagaccacgctacccggggcgctttccactggtggggatgtagtggctaaggggctgctgtatgcccaggcgattgagctgtcatttggatcgccatacatcgacttccattttaactacagcaccgacgatttcactgggcggattatagccactgccgccgatcaaattagtgtgcaacgtagtcatttgcgagttgacagggatcttcgtgtttttggtatggcagacattaaagggtgggcgcaatgcggcgtcgatctttcggccaacagaacagacttcggttcccctgctattggttcgttggtttcaggtggcaggattcgttctcgaatgctcgggcgcggcggtaacgttgacccatcaggggcgtggggcggtttctatgttgaggagtacgtgggaaccgaacacaggattatcatgtatatggacggcttcgggagaaccgacgcatggtcattccgctcaggtgggacgatctccacacccaaaggcgatgttctcactaccggttcagacgtgcgcctgaaaacagacttcacccaagcgcctgagaaagcctgtgagcgcatcgaacgattaggggtatgtcagtaccgtatgaagggagaaagccgcgtaaggcgtggttttatcgcgcagcaggctgatactgtcgacaaggtctatacctatcaggacgttgagcaggagatcgacggcgagcgtatcaaggtgatgaacgtcgactatgtggcgatcatcgctgacctggtggcttcggtgcaggagcttcggcaggaattgaaggagctgaaaggggaataaaaaaaaggggccgatggcccctttctttacagcacgtgataaagcacgttgatcacgaagcccaacacgaggccgatcgctgctgccagtaatggctgtttcattttgtcaaacacgttattcaccctctactttaacgagttcatgccattcgattcccaggggcttcgcaaggcggatcatggtttcaatggtcgggaactcacggccattgtcataacggcatacgcggcactgcgcaatgcctgctgctttcgccagaccacgctgggaaaatccagcgcgctcacggtgttctttcaaaatcagtgtgatgttcattttctacctcagaacgggatatcgtcatcaaagtccatcggcggctcgctggactgctgctgtggttttgactgctggcgcgctgggccggaatgtgtcttcggctgtccctgcggctgcccctgctgtccgccttcgctcttgcctcctaacatttgcataacggcgttaggcccgttcagaaccacttctgtcgtccatttctcgactccgttgctgtcagtccattttcgtgtttgcagctttccttcgacgtagatctgagaaccctttttcacgtactcgccgacgatctcagccagcttcccgaagacgacgacacggtgccattccgtttgctcctttacttcgccggtctgcttatcgcgccatgattctgacgtcgcgatcgtgaggttagccaccgcgccgcctgacggcatgtagcgaatttctggatcctgaccgatgcgacccacgaggatcaccttgttaactccacggcttgccatttataacgctccttaaaaatcttcttcgacgtctgattgctgcggcggtacatcttgcggctgaacgtcatcaggtgcaacctggacggtagccttaccgcgtttagcattggctggcttgccggggttgaacggtctggcctccgcgtttttcagctcgacgatcttgctggcgcgggcatcttcgacgatgcgcagtgatgccttgtcgctgcggaacagctcgcacgcggcgcggtagattgcatccacctcatccttgtccttcgcggcttcaatggagcggcggcagtcggctgcgctacgcactgatttgttgccgtcgtcgtcgtccatggtgaggccgaagatcgaaacgcgggcatagcggcgggcgtaggtaagcgttgagccgaagccctgggcgtcgttcttcgccagcgggatctggcagatatcggacagccattcgcctgtggcaacgtggatgatgcgcgtctccatcagcatcacgttcggagcctgtccggcctcgtgcgtcggagactggatcatgatcaacccggcatcttccattgccgggccgatggcggccgcaacgtctccgagggtcgcatagtggtttttcaggtgctggttctgcttggatttcttcggcgatacgcacatatcctgcgcgtgggcaaactgcttaacgatggtgctgcatggctgagaaaatttcatcatttggtcactccttatattgagggggtaatatgtcagtatattacccaggaatcaattattttttggttttcacatcttcccacaagtggcggaaggcgttttccaggtagtacggaggatcgaggtcaatcacgcttccgccgccgtaggtcggccacgtgtcattgtcccggcaccatttaaatgtggcgatggcttcacgcagctgcgcatatccaatcatcagggttttgtttgacaaggcgaaaggagcgacgacgaacgggctgctcttctcctgcgccagcaacatcgtccttctcggtttctggccgaaagccgccttaaacccctcgcgctgcaacgccattttcagcggatacccgagatcgaagcacttacgcatgaatctttcagggttggccgtgtccgtggtcttgtagtccaccatgtcggcgaacttgctgatccagtcgaggcgcaccttgcagcgcaaaccctgatagctgaaaaagatcgagacttccgacattccgtcaacgaaatactctttaaacgagtcgttattaaacagaacggcgcgcatctcctgaatgatgtcataatcctgtccgcgaattccttcacgatctcctcgctcttcattggccttcttgactatatcgtgccaaaagacgacgtcgtttattccaagagctgcggcggtattggtgactgtctcaattaattccggctctttcattttcgaataaccggcaacaccgtgttctttcagaaatgccttcgcggcctcaagcgaggtaataaagttcggctgcggaataatatcgccgttatcgtcacgcttaataaagtcctctttctcaggcatgcggaaatattcacgggcgaataattccggctcaaggtggttagcgtgggccgctgtaccgaagaccagcgcgctggattgcttcttcttgtcttcggcaaatttccagttggccgggcagcttgagaacagctcccacaagcctgagccgttcatgtggtctgtctcagcgtgatagtcttcgttcgacaggtcgttatttgtgaagaacagaacttcatcatcttttagcgatttaatatctgacattacatgatccccttattcatatctaaccgaagttttcgttcgatatcttcctgcctgacaaagcggcgtgaatcgcccttgcaattaactttcaatagccatttgcttttattctcaatagccggatacttcacggcaggatcgcggaatagaatctgaccaagcatcaactcggttccagtgggtacgccacaaaataaaacctcccatagcacgtccctgataagatttcccggcgctctatatgtgagaaccactttctttaatgatcgcataaggccgtaagcctctttgaatgttttgcggtcagtgttgcgaatgccgccgtgcaatattctgtgtaactctgcatgtgtcatgatgacctcctgtgtggtgtttgggcatattacttccgcataataggccatgtcaaggctatttaactatgatggtcgacggcccgaggaagtcgatcaccgccagcttcgcgcagtgaaagccataagccaccgcagcgaagccgccctgagcggatacggcggacaggcattcaacctgctccttgctgactggcgtcgacagctttttagtctctcgcttcatctcgatcaccccgaacggctccccgttgcggccacgatgcaggatcacgatgtcggcaacgcccttacgtagtcccttcgcctgctggcgcagaaaatactgcttcccggccttcccgccgttctcgttcggcacatggaaccagtacacgtctggataccaatgattaaaccaggtggtaaagttaaccaggtgatcatcctcaagcgctttcgtcggttcatctggtgggtaaagatattctttaatcacaggtcatcacctccttcgaaaattttacgggctatgacgtcgcgagactttctgccgcctatacgccggtgcgtcacacgcttaggcgctgcaatcaggtgagcggacggcaggatcttcgtttttacccctttccgcatcttgccccgagtgttcggtgatgcaacgtgcttatccagtgccgccttccactgctgttttgctggcatgctgtcgctgtccggccaaaagacctcataggccacaaagtcaggatccccctcattccccagcacgtagcggaacaccacgccgtttccgcatttcgtcggctcaacattaaaggatcgcacgtccacaaagtcatcccgtgtatagctctttttctcaaggctcctgtttgggtcgatcaacgtgttcccgcagtgggcgcactgccgggcggtgatgtcgttctccgcgccgcatccgcgactgacaaccacgccgcgatcgttcttaaagtcatcgcatgtgcgcgagatgaaccagtggtgacagcggtcgtccttgcggtatggcgtgccgtcttcctcgatcccgtcgtggtcgtacacatggcggcaccggcgcgcgtgcttgccgttcgtgtgtccatatgggcattccttcgtctggccggtgctggtatccgtctcatagcggtactgctcaaggaatggcgagaagtacagctccgccaggtcgtccagcgctccaccgtagtcgagaacaaggttgtcctctttgaccatccccagctcttctatatggaattttttgaggatgcgcatccctcgaccgatgagctgaaccagcagagtgaggctgccgatcttgcgcaggataacgatcgtgtcccacggtggaacgttgtaaccggtggtaaggcacccgatctgaaagatgaatttacagcggttgttaaatgcgtcttccagtatccgatcgcgctccttctgtggcgtgtcgtcggtgatgatcccgtaagtcactccgggcggtaacgcgctggccgcctccttacagtgcttcttaccggcgcaggtaacgagtacgcagttacggttggcggtacgcttcacgacgtcgagcatgatgttttgcgtgatggttccctgggacaggatctgcttctccatctcgatcaggtcggcatcactgaattcgtcgtcaccctcttcgccgcgactcacgaatgaatcaagctgataggtcagctcatcatcgatcgcaccgtaatgggtaggcaccaccgcgccaacttcaaccaggtactcggtggaaatgtcacacaccgcacgccgccagaatccgggggtgttcctgtcttcgttgatgatcggctgtgtgcctcggtagtcggtgccggtgtacccgataacaaccagatcccgaccgtacatctcccggcaacggcgctgcatctcccggatgataagcgtgtacccggtgcggccagcggcgatcatctgcgccagcgtgcgctctgctttgcgctgcaacatctcgttttcaggattctgatccgcaagagtgcaggtcatctcgctctcaacgatgtcgtctacgttgacgtgatggcattcgtcgatcagcaggaagcgcgccacgaagttagccagctgcttttcaagggcgttgaccaccgtcttctcgctgccgcaaatgatagggaaggtcgttgacttcatgcgcaggccagcgctgaacacgctgttctccaccccgaagttccgtatctccatggcgtcctgcttgatgatcccgccctgacgtgacaacactagcgcggtcttgttgagctgggtcaggcggcgggccaccaggcttatctgcgtggtcttccctgccgacacggcggccttgacgacgaacgggccgatctccttgtagttgttgatggcctgagacgtcgcaaagtgtgccgcgaactggaacgggtaggggtcgtatggcatgccgcgaaggcctctaagcagctggctgcgaaccgcctctatgtccgtctcctcaatcatttgcttgatgcttttcaccttttccattgttgcctcgttgacgtggtaaacattgcaatatattctgcacaacgaataccaaaacacaaggaatttaaaatgatgaatattggcaaactacccgaaccagaaattcacgagggcgcgatacagcgggcttttgtgcgttctatgggcaactcattccagatcatgatcccgaactactacacccctgacaacttgggctatgaggcggatatgttctgtatccgcaagagccgctacacggtggaagtggaggtgaagatctccattgccgacatgcgcgctgacttccgcaaggcccacaccgtttacccaaagacagcggaggaagcagaaaaatactggcgatcagacgaaaacgagcgcgtcccgtacccggtgaagatgaagcatgactgcctgaaagctggtgagctgatagccaaccgcttctacttcctggtgccgtggactatcgctgacaaggcacgggagatcctgccggactatgccgggctttacgtgtacaaccagcgcggactggtacacgaggaaaagatggggccgatgctgcacaagcgtaagctcgatccgaaatatgaccaggggatcatggccaacctcaacacccgctacctgaatctgtggaggaggtcatgaagttctaccccattgagcagatagaacgactcatggtcgggcgctgggaggtgctgctatcccagtattgggataagcgcgcattcaacggcaggcatcaggcctgcccgctgtgcggagggaacgaccggttccgctggggagaatcgaagcaggacgtcacgatgaagggtcgcggtgctgcaatttgcaaccagtgcggatcacacctgggcctgtggtggttcatgcaaactaccggctacgaattcccggtggcgctgcatgagattggggccaacttcctcaaggtcgagcctgaccaggaaatgacgaccgagccggtgatcgcccgcgacgcattcccgaaggctccgcgcgtcaggctggaagagaaaaacttatcagcctctcagaagtacatccgcaagcagcaggccgcgcctgactatgaccgccggttctggatggcctacgacctgatcgagacgatgcgcaaatatcacatgtgaaatacagttgacaggtatatggtgcccaagtaatatgcccgaacacccaacagaaggagcagcaaaatgtcagaacaaaccaccgtgtcaccgaagaccgccagcgcagtagccgaagaaatcaaaaaagctattggtcgccgccgtatcccggtaattgtcgcagaccaaccggccatcgcgttcatgatcgccaaagaggccagcaaaacaggctacggcgaagatgagcagctgggagtgaacgccggattcaccgagaaggacgtggtgaaccagatcgctaacgccgcgctgttcagaaagtcatataaccgcgtccagcacgtcgtcgtcatcaagtcgagcaaggcggcagcggctggaaactttgatggccgctacttcgtgaagatcatgtgcaatcgcctgtatgtcaccatggggagcctggctaactatcttgcgggggcggaatagtgagcggggcaaagcccgtggtgattggctgccggaaaatgatcaaaggcagcgagcgcggaaagatggtctgctgtgggacatacttccacgctggcgggcgaagcagatgctggcacgtgatcgataatgtcgtggtgtgtaaacgttgtttcaaagagtggaaaaaggagcacaaagatgaagaaagcgatatttctgtttaaccgctcgcggcacatgttgcagccgtggttagacgctggctatgagtgctggacatttgacgggcagcttcctgacggcgttcacgaggttgagccgggattgatggcggttggcatgtggttcgacgcctcagctaccagcgtgcatgccagcgacgtagccaggatcgtaggtggtggcgtgaagttcatcgcctctttcgcggaatgcacatatctgaccactaccggcgcgcgctggctgtatcacccggaagatcgcgatcttccagttgctgagcgccgaccgcacccggcataccccaaccgccgcagggatatggaggacgctgtgaagctggcgaaattcgttgagctggtggaggcatattgccacatcgtcaacggtgatttttccaccggcccgatcccgtggatgctggagaatccggctcgatcattcctgcctaagctgtggcgcaacttcaatcacaccttcaacccgtgtgactatggcggctatatcccggagggtgaagagatgcacccggactaccctggtgtcattcctgaccgtgacgcctacaccaagctgaccgggatctggtgcagtgaagcgttcgtgatgcccgagccgaagccggtggagccagtaggcaaggatttcaaccgggcgataaaggtcggcggaaagagcacccgcaccaagaacatccgcagcgccactccgcgaggcttcgcgctggctgtattcgaggcaaaccaccgtgcataagttcattatgacactggaagattaccggatgtttgccactcgtgaagaacaccgcgtgatcagcgttgaagagccgccgattggcgatgcctgcatatcgtgtgagggccgccttgatattcacgtacaggtgatctcctgtcgtgaatggacgttaggcggtcagctgttttatgtgagcaaaatcaaatatcggtcaaataccccaaaggaaacgaaatgaaagacgaagcagacaaagtgactatcgacgagttcgaagcagaccacaacccggcgctgcacgcggaagccgcagcaaagggaattacgccgtggcagctgttcagtaatcgcgtatgggctacgaaggggctggtgactggcgggcactaccaggcagttcgccagcagaaagtgaccggacgccggttcaacgggagcaagaccccggataacgtccgcccgaactggcgcacccctgagcacgtgttcgcgtggctggatatgacctacggcccgtttgaggtagatcttgcggcctgcgagaagtcgacgaaatgcgacttctacttttgcaaggaagagaacagccttgcgcaagactggagccagtttgatgcgatgtttctgaacccgccttatgacgacatcacgccgtggacggagaagagccgcgagatcaagccgggcgcagtgctggcggtggtgctgccgaacgacaacagcacagtgtggttccgcaacatggtggatcaggcctacaccatcatcaacatcgtcagcaacggcaagaactctggccgcctgtcgttcgaacacgctggcaccgggaagccaggcaagcagaacaacaaaggcaccgtgctgttcattctgcgcgggcgtaagcgtcgcgccggtgtggagacgctctacatcgatcaggatcaaatgctgcgcgaactggggttactggatgcacagtaaggcgcaggtctggcaggccgcgaaggagtgcggcctcgacgaattcattaccgccgtttcaaaagcgtttcccggcgcgattgacggcgtggcgatatctgcgaaagggatcggtgttctggcgactgacgaccgcatgctgcgcaggctggtgagggttaaaccgggcgtgacgctcacaaagcaacaggtcaaggagataaggacgaaatctggtgttactatgcgatataaaggggaaaattgaggagtagcaccgatgggtaagacgtacccgaggcacaatgcccgcactgtatcacgggctgacaggctgcgcaggatgaaccaagataagaacacgcgagtcatcaccaaatacatcgccgggacactagcccggctaccagaaggagaagatcatgacgttagcacaggcaatcttgaaggcatcaaccgaagggcgagatcttaaagtaggaaagggcgtagatcgtgagaacaagcacataggcccgcgaaacggtaagttctggactgacgaacgcattcaggaagtgaccgacgacgtcaccgttcggcggatgacgaaggcgcagatcatggagaagcacaacatcactgaaagcggtttttacaacgcctgctaccgttttgggatcccgacaacaaaatgaaaaaacataccgttattcatatcgacacggctgaatttcataatgccgtctatatccttggtcgtgaagagaagatctataactggaaccagaacgtcgagttccgcaagcgccttgttggcctactgggggagattgcagcagcgaagcacctgaacaacatttacggccgccaccggatcatcatcccgatgggagtcaacgcgcgcaccggcgtttcggttaatgcgttcggccagggtgacatcatgaccatctcacgcacagggacgcgagaacggcaaacgcacgtctatgaggtgaaatccaccgagggaatcggcaagcagttgccaaccatccggcaggacaacgctgaaagctacgtgatgaacggcgttgatgcaatcattctggtggcggtgcatatcaacaaggcgaaggcagagtgccggatcatgcagcaggtatcgcctgttgaagtgatcgagaagtggaggccgatggttaaccggtacggtcaggagtgttatgctttcaactaaatagactttgagattatcatggcccccgttaacactcacgggggcttttcttttgggcgacttcttccacggcatcaccgacatctatcggatgtataagaccgacttagattaccccatcgctgcggccgtcatggctacattgcgtcacatccagctcggtcatgaaaggcgacagatctggactaatgcgatcatggcggcaatgttcgcgaagggcatcacctttatcatcaacatcatcggggattccgttccgcgaatgcactggatcgcaaaccaggatgcaggctggatcgttgcctgcgtgcttgggtacgttgggatcgacaaggtcattcgcgtggttgagcggtatttcccgtccatgaatctcaggggaaaaaatgatcggcaaccttaaaatttacctgctggcggcacttgccgcctttttgctatggcagggcggcagctatgcactgagcaggtacggcgaaagccggtatgaaagcggcgttacagctgggattaacaaggaggctgaacgcagaaacaaaattgaccgtgatctggccgaaatgcgccagagggagaaagaccaagatgatcgcgacacgactcgccggattgaccaagcacgcgctgacgctgctagtgctgcttatgctgctgacaggctgcgccagcaactcaactcagccactgccatcgcaaaacaacgcgcctccgctgtcggcgttagcagtgatgccggaacgctcgccgatctgctcgccgagctgttctatcagtcagtgcaagcgggtaacgaactggcagcagaagctgatcgatactacatcgccgggcagcgctgcaacacccagtacaaccgactattgcaagcagcaaggagtaacaaatgaagatgagtgacaacgggctgcaatttacagcagcatgggaggaattccgcagcgcgccttacttcgccaccgaagacgagcgccgtcgcgggatctacacctggggcttcgggcacactggccgcaaccctccacgcatcaacatcacgcgagaagccgcgctggcgatcctgcgtgaagacgtagcctatgctgagaagaaggtgaacgagtgggcacataagtccatcacgcaacccatcttcgacgcgctggttgatctggtcatcaatgccggtgaagagccaatcaagccggacaagaaggcgggagacttcgacgacctggtgacgcaaggtcgctgggatgagctgatcgtacagctggagttcttccgcaaacagaacgggaagatcatccctgggctggttcgccgggcactggcgcggcaggcgctggcgaaggggatgaactggcgggatgctgaggccgttggccggaacgcgaaggtgtaaaaaacagggggccatttggccccttgtttttagttcagaacaatgaaactcaacagcagatagccaggcgcgtattcgccaacgttggcgatgtgagtcacctcaaccctgatcacccttcctgtgtatccgccgatctccgtccactccctcaacatcagggtgtcgccatcagcgtaatcccggtcgaacttccttaactccgctcgttttttaccagaaacagccgcgttaaagtgaaccgggaggattttaagatcgtggatcacttcatccctcccacgacctcagcgccgatagccgcgtacccagcgaggtcttcgaacgagtcggtgttgtcgtcagtctgagcgcggcagatctttaaaatggattgtagcgtcaccacgtccaggccagtcagcggcatgttctggcggttcgcagacgaacgcacgatattgaatgcgtcagctacgcggtcgaactggcgctctttgccgttctccgcgccgtagcggcgaccgcgctcctcaaggtggccctttaccttctcaagaacctgggcggcgtcaagaggctcagaggagcttttatgggcatcggccttttcggcgaccatgtagatcgcggttccatccgtgcgagcacagtcgcggttcagtgtcgcgatgttgtcgagggtcagcgccgactcatcagctacaccgtggtggtggaagaagttggtcggaaattcgatcacgttagggactgagtattcaccgtgttccaccaggcaatgccagcgggcgatgatggtttcctgtccggcaagctcaccgtagccgatgaacgtcaccagcgagttgcggcccggaatgttgctgccgcgcagcgggctgccgccttcgctgatctcataggtgaagcgcagaatgtccccggcagtgaagcggtcggtaacgtcagttgtttttttcttcttggtggtcatgttcatttcctcagcattgcattagtgttttgcgccagtcggcgctttcgagatcgacgtagcctagcagaacaggcaccccttctgaactccaaaattcagaacggtgattcacgaacggctctatgtcgtaggcatatagcgcgccatccatatccaccgccacccaattcgaccagcgcggcacggttatgaccatgccgttatagttgaataccttaaacagcccgttagttatcagcttcataatcatccccaaagcacggaacgcgcgggtaggtcactggtgcataggcctcgatcctgaaatcgcggttacggtcgatcggctggtagaatgaactgaactccgggtgaatgccttcctggcaccagccgacgaagaagaacggttcgccgccttcatcggtgcggccgtcccagcacgccagctgttcatcggtgtacccgcattcgtcgaaattaacgtaccagaagcggcggatcaggcggcagttgttacgcagacgcaccaccacccaaaactccatttcatgcccgtgctcaatgtccggggtgtcgcccaaagaccagactgacggcaagaattgttcgaatactggctctttctgtttcatttgcaaaaatcctctacgttgatgaagtcgggggtaataaccatgtttcccgcccgcaggaagctcaggccgaagcggtggatcagggtgctgcactggtcgatgtcgctgtagtgcattcgacgccagaatcctttcagtgtcccgacgtcgtcccagcgcacttgcgggcggtcgatgaactcagcgcggacgaaccggccatattgccaaacccattgccctggcttcacgtcggcgacctccacgagcttagtggggaataccgggatcttgctcatcgtgctttcacctcgccgtagtagccaacgtccatcaggtctgatacgaccgcgatgacctgagccttcgcctcatcatctgccttgttgttggcaatggccttcatcactgcgctgcgggtgacgtcgaacatcggttcggacacgttacccttgcggtagcgctcacccagcttgcaggcgtccttcatgaccttatccatctgcgcgttatccggcaggcggtcgtatacaccaagatcgcgctggatattgatgttcttgatgccaacggcgcagctaacggcgctggcgtccccgacgtatgagcatcccagcacagcggcggcggcgatggcgatggcggtaatgcgtttcatcggttactccttattaccacggatggcggcgatggtttcaatgtggcggcgctcttcctggcggcggcgctcttcttcttcggcgatgttacgcatcaccagcagaaacaggatcgccagcagcggggagaacaccagcgacagcagcgcccaacccagtccattacgtccacgacggtcagcagcgatgcctaccagtaaagccagaacacaccaaataattaacacgctcatgattctctctcctgttagtcccggcaccctgccgggatctgcatattagtacggaataataaccagtgtcaacactatagaataattccagcgccgtgcgtgtaaacggtggcgatggtgagcagctcaaggcgtagcgacttcaacgccccggcggcggtctttgcgtcgatctcggtgacgtggctcttcgagtcggtataagacgccttaaagcggttgtgcccgtaggcgatgcagcgcacgcggccgaactcgacgacgacacggtaggtcttctccttcgtcttgtcgttgatagcctcaatgacgctgaacctcgcgccgttcaggataagcgagcagatgtgagcgccaatctcgcgggcttcgtcgtggctggtgatcttctttagctggtcaatcattgcgggcctcctcgcggcctgcgggcgtgatctcgcacgccccggtagttatgttccactttgccagcccacggctgacaagtccgttcagcgcggtgacggtatgtgacttgctgtcgtatacccagtcgcctgcgcgccattctgagacagcaagccgctttaatacggcccgctgtctgatacgcagcttcactccgggcgacccccggcagccagccatgcagcgtaagcgatagatcgcgtcagatcgcacttcatggtgatcttgcggtcttcatcagcgttgacccactgcgagaacgtcagattcagaggcataggctcaccctcagcggctgcgagcgcatggtgatagctgttcagcgacagcagcagggagactcgctgccgggcagtcatttcacgcatgatcgcccgcacgcacatggaggcgctccccgccccttcatgcttgcgctgtcggccatcccagaactggaatttcatcgacagcggtggtcttttacgtccgtccataatttcctcctgctatgatatatattcgacggtttcaggaatgatcgccgcatatttgcagcgttttagcgctggtatgtaccagaaagaaaacatccgttcttcgcctgagctgtcgtcaatgtcaacgtgacacaaagacgcctcatagacgatcccactggcagcggtgacgcgaactcttgggtagacgatccccttccatgcgccatcaatgcccttcatgaacttgttggcggcttcgtctgcgcgaatgaacgacggttggtcgtggtaagggaagaaagcgacctcagcgccattaacgacgacggtgacgcatttactcataggctcctccggttgtggcccccgaaggggccggttgtttcagcagatatagtcaacaatatttatcagaaaggcagttcgctatcgatccccgtcacccgtgggcgggccatcatctcaaggtattcattttgtgcctgctcctgcgccagttttgcgagacggcgaacgctgaccatcagtttaacgatgaagcgggccgggtaacgatcgagggcaagcagatcctggcaaacgcggtcaacggcacgctgtacgccgatgtgcatcaggtagccgttgtgggtgtagtggcgggcaatctgaacagcgcggtcaacgatgccattaacttccagcgcttcggcgtgtgcttcctggcgggctgcgtaggcgcgctggccttcaacggcgtccagcagtttagccagaagcgctttcacgtcgcacaggctggcattagctttccactccgcctggttccagtcgtcgaggttggaggcgatgtaaccttctaccgcctgctgcatatcgtcgtacatggtttcgtcaagggtgtcgacgttttcgcagatcagggcgttcgctgcggagtcgatgatcaggcatgccagcaggtcggcattcttgaactgtccacgggcttgctcgttggtcatccagcttgccggattgccgatggtcagatccagcgcagcgagaatttcgttagcggcggtaagatatttgatagctgacttagacattttgcgaccccttgtgatttatcggttagttactgcctgttcgataaatatattataggggccgcatcatgtcaatagtgcttacactactccttaatgaagtctttgaaatctgcggacgatgtctcgcgccaggtcatcagtctaccgttaatgatcgcgtgacgttcgcagttgtaatcgtcccggaatttcaggatggtcatggtgttcaggccggtcttggtggtcagcttgcgcatgctgcccgctttagcgagaagtgcggggatgcttgtaacgtggcaaatcaggctcatgttgttttcctcagtggttatcacggcagctacccataagcgggggaacggcatctttgatcgtgtagtaagggttccgggcttcgtgtgggttagactctttgctcaggtgtcccagctcagccattttgtaaattgcgtcgcgcactgactcccgtgaatacggcgtaccgtcagccttaaacaccgtggagctgatacggtgcaggatctccttgtatggcgcggttccgtgcggctccgccctcagcagagaatacacggcttcctgcaatggcgtgtacacgtgcgcctggcgcttctcctccggctcaaagtgctcctcatccgttccggcgtccatatcgtaaacgcggtcttcgaacagccagaccttcgtcgcgtcgtcgatgtagatgaagtctggccgatcaacctcctgccctggggcaagtttcttctcatacgtgcttttcttcttcgcctcaacgtccttcgcgaacaccggcacctgaaagcctttgagcttaaagcgccccttcaaaccaccctggcggctcttaccgacgttcaggacggtgtagcctgtctccttctggcgggcgttcaatcccttgcctgtctgtgtcttctcgcgcaccaggctgaacgttttatacaccgcgcccttcgctgcggatccgccacgagactcaagatcatactggccggacatcaggcttcccttgctgacatgcgggatgaagatcccggcgcagttgagggactcagcgaaccggtgcccggcagtggtgatcagctgctggtcggtgttgctgttttcgtccatgctcacgccgttattgttggccgccgccaggtggaacattttgctgtcgaagatgaccagattcaccggcctgccgttggcgaactgcaacacgcggctcttctggatgcgcaactttcctggctccatcaggtcggccggccgcttgaacaccttgatccagtcacggagattgacgccggtgcgcagcgaccatgcggccacctgcaactcaacgctgtccgggtcttcggtgaagaacacgctgacgccggggttacacacgcggaagcagttgaacagcgggcgacccatggcgaggctgaccgccatttgcaccagcagcgtcgttttccctgcgcctgcatcaccgttgatctcgttgatggtgcggcggttcagcagaccttcgatcaccgggtcgtagaagtccggcgaggtgttcagcacatactcgccagggtcgtaatctttcagcgcgggatcttccaccaacccctgctcaacctcttcggcgaggcgctttgccacctcaacgcgctgggcggataagtccatcccgagattctgcttttcattctcctcgcgaacgatgcgttgcagctcaaggtggcgctgaccggcgtctttcttcttcggcttaggtggttcaggtggaacaggtggcgatacttcttccgcctgttcacgctcctccacctcagcacgtgctacctggtcgaagtaagcctgcatgtcggccatttcctgcgaataggcttcgtcctcttcctcgcgggtcattggctggttgaggatgtccgccgcttcgtgctgtttctcctgatcacccagtaacgccttccagtcgtcgggcgtcatcggccttttgttctcttcgttcatcgtttcctcctgctttggttcggacattattcacggcaggtaataccgtgtcaatatcaattactttccgcctgaaaaacaggctaaaacctgtaaaccaatactatttatagactgtaaatacccgctattgggattttcatcacgcctttagttttcaatggcttacagagtacgttttttgagcagctgtaaaccaaagcgattcaagcggagccactcgccacctcaacgccacctgaacagaaggcgtgcttcgcaagttattgataacaaaggactacctgaaattttcaggaggaaaagggtcatactaccgaagttgcaagtgtctgatattgaagggttaatttcaggtgttaggtggtatccctattatatataaaacccatataattacagaaacacgtacacccttacgcac

SEQ ID NO: 72 - DNA, 47608 bp, unidentified
  source 1..47608: mol_type = genomic DNA
atgggggaagaaaaaagcgctacgcagtggctgcgcgtttttattctccccaccatgccgtataggggtaaactggggcagagccacttgaaagaggaaaccaacatgactgacaaggtgaaggtgacgacaccgcggaacccagtcggcagaccaaccagctacaccgaggacatgccggaaaaactccttgaatatttccgtgtcgacgttgatgactatatccagcactcacacacgacagccgggaaaagcaacattcgcattaacccgaagcacatgccgtctattctcaacttctgcgaaagcatcggcatcacgacgacaacgtttcatgactggcgttcgaagcataaggaatttgctgtcgcttacacgcaggcgcgcgagctttacgagcagatgattctgaatattggcttcgccacgaacagcactttcgcgaccttcatgctgaaagcgaacttcggctaccgcgacaacactgagatcgtcgtgaccggtgacgccaacaagccggtgcggttgaagatcgtcagcgagcggccgaaagatgagaagccgcgcgaggagtccgaagccgtcgactggggtgacgactaaatactgcttgacatatctatgactgcgcaggaatatgggggccgggcaatcctgcccccactgcacaggacatcaaaatgactgaatcactgaaattcacctccccggcaccggcaccagttagcgacgttctcgtttgcgcttccagaaaggcagacgcagagaatgacatcagactggctcgcgccattgatggcgagctggacggtagtggcaccgagcagcacgttaagatcaaggtcggaaccctgcgtgtgctggccgatgccgttatgtcactggctaagcagaaggtatcgcttgaggccgcgcttgttgaacgcagagaagacctggctttattaggtggacagctgaacgaatggcgcatgcacacccggcacatcctggatacctacttcgccacctaccccaccagcaacgccaacgacatgaatcttcgcctaatcatgacggcggctatcgaaagcgcacacaacaaaaacaagcagctgaacaaggactatgacgccatgcgcaacagcgccgacgcatcagaccagctgcggaaggcagcagagcgggagcgggacgacgtgatcaacctcaacagcaacgcagcggaagagatcacccacttgcaagaacgcgccaaacacctcgatcaaaccatcgtcgacatggtgcgccagcgcgacaagaacggccagcaggctaaccagctggctaacgaactggtcgagaaacgcaaggagatcagcaggctgttagaaatcattgaccgcctgcacgcagagatcgcagagaagcgcgacatcatcggcgcagtaacgctgcgctgcactgcgctcaccaatgacgcgaaggcgatgagcaagaataacagcgaactcgcagcacgcctggctaacgctggtctggagatcggcagctataagcagctcgtggaagacctgaaagcaggcaccgcctttgaccgtggcaccgtgaagcgccaggctgacaccattgatcgcctgtatggtcagctcaatgagtggcacgactgggctacagacgtcatttgtagcccgtcatcactgggcggtgaagcgcagcggactgccatcaccgcagcgatgcgcaagcgcaaggagcgcattgagtcactggagcagatcgtgaaggatgtcgttgtacagcgtgacgcgtgggttatttgggcgcgcgggtacaccaacgcaccgacaggcatgcacagcaccgatcaacttctttcgatggtgaaggcgaaagtgaaggcgatcacagatggcgtcgacgggccagcggagcacaccatgtgcggcatgatgaaagtcacccagctgaaaggggatgtcgttgccagcgatggaagctgtgccatgctcaaacacggcaacgcggtgatcgccggaaacattccagccagcaagctgaccctgggcgaggagatgaaagaggccattcgcgaagtcgtccgggaggagatgagcggcgcgttaaagcaagccatcaagaacgaacttgataagctgaccatgtaacccatcaaatcattaaccagcggcccccagcgggccgcaatgaggtgacataatgcagaccttctacccagtctttagcgccattctgtgcctgtttttctttctctgctgcaaagggtgggcgacggccctggacatcggagcagggaaagacaagcgcatgatcaggatggctcgcaccttcgacatcgctggcgacgtgttccgctgggcgtgctggctgttcatcgtgggcttccttcgcaccctctgattgttctgattgcttacaatttgtaccatttgcccggttgatcaccgaagtgactgactgataggctttaatgagactcgcagcgaggtggaaatgatggggatcgtaatgggtgtgtggttggcgctggtgacagctatcgcgatgatcgcaattcacatggccgcaatggacagggagcggctcaaggccaacccggtcagccagatcaccaagctggtgctcgcggtcttcctcctggtcggcgtagcgcacatcgccaccaggtacacagctttcctccgcgtgctatcctgacctgacaactgctatcatggccccgttaacaaaacggggcttttttatgtctatccaatctgacgccagtcaattcattgacctgacactcacaccaccgcagaacgactttctgcaactgtcgtgcaaacacccggccttcgtggcgggcttcggtacaggcaagagtcagaccatggccgtgtcgtccgtgcttgacgcatcagagggtggcgcagatgcaacgatcgccatccttgagccaacgttcgacctgtgcaagctgatcgccgtgccgcgtatcgaacagatcctctccgagctgggaattcgctttaagaccgtcggcaacaaggagatctacacctcccacggcgggatcggcgactttctctttcgctccatggacaacccgactcgcctggtcggctgggaggcgttccgcgtccactgcgatgagatcgacaccctcaagaaagaggcggccaaaggggtatggcgtgcagccattgcccgctgccgtcagtcaccgaaggagtatgagccgttcgacttccttccgtcagaccgcccgctgaacagggttagcgcctactgcacgccagaggggttcaacttcctgtatggccgctgggcgaaggacaaggagcgcagccgaaaggccggttatctcatgatccaggccgccacctcatccaacccattcctgcctgccgactacctggacgccctgcgcgccagctacgacccgcagcgcttcgaggcctacgcgaaggggcagttcgtcaacctgaaatcgggcacggtctataagaactttaagcgcgagctgaatgacaccgacgtggagatcatccccggcgagacgctgatcgtcggccaggatttcaacgttaacaagatggcgacagtcgtctacgtcgagcgctatggcgaggacgggcttgccgaactgcatgcagtggatgagcgacacaacggcatcgacacaccggacgtcatccgctggctggtcgagaagtaccagaactcgggaaatggctacatccacccgatcgaggtctacccggacgcatccggcggcaacaccagcagcaagaacgccagcatgtcagacctgtcgatgctcatgagcacagggttcgacgtctactgtggtcaggctaaccctgccgtgaaggatagggtgatcagcgcgaacaccctgttctgcaacgccagcggccgccgtcggctattcgtgagcagcaagcgctgcccgcaattcgtcgaatgtctggagcagcagatctacgatgacaagggcaagcctgacaaggaggccgggaaggatcacatgaacgacgcaggcacctacccggtggtctataagttccctgtcgtgcataatggcacgatctcagcaaataatattgaatgggtacgatgatatgacgatcacgacactgccgcaggcggggacggtatccaccgaacacccgctttacaagcggtttaaccaggaatatcgcactatcgaggactgcgttgcaggacagacggtcatcaagcgtgccggtgttctgtacctgccgaagcccgaagcgtggacaatgaagcgttacaacgcttacaagcgccgcgcccacttcctcaacgccacctatcgcacgcagatgggtatggtcggcatcgcgttcgccaaaccggccacctacaccttgccgacggccatcggctacctgtcgaccgacatcgacggcgaagggctggacatggatcagctcgttcgaatgtgcgtggcgcagaacatcaccttcgggcgcggtggcctgctggttgactatgactcaccggaggatgtcgggcaggtgactacgctggtcaatagtggccgcgtgactatccgcatgttcgaccaccggcagatcatcaactggcgcaagagcggcggcaaatattcgctcatcgtgctgcgctacctggacgacgtcgactatgacggcttcgagcactatcaggtggttcgctaccttgagctgaggttggtggatggcaaggcatattcccgcctgtggacggacgaactacagggtgccgccgggctgccttcctcggtcattcaacagaacgggaacatgaaccaggagcagccggaactgcgcccgatcatggctcgcggaaagcagctcgactatctgcctttctgctggttcggcagcgagaagaacgacagcgacattgacccggctccactgtccgacatcgcgaacaccaatatcgcccactacaacgccgacgccgacaacaccgacagctcgtttatctgcggccagccgaccttcgtgatcgccggtgtgccgcagaactttcagaaggacaatccgagcataaaggtcggcggtgacgaagcgatcattctgcaatccatgggcaccggcacgcctaccgccagtatggtcgttgcaccaccgaacaccccggccgccgcgctgctggagaagcgtgagaagcagcttgccatgctgggcgcgaagctggttgagcgcaacggggcaacgaagaccgccacccaggctggcgcggatgagaaaaccgacaactcgatcctctcccagtgcgtcggcaacgtcgaggcggcgttcaatcaggcgatggagatggttaaagacttcactggcaccgaaggcgcgaacgtccacatcaacaagcgatacgaagatatcgtgctgaacccgaccgaactgacagcctacatggcggcggtgcagtcagggatgatgcgtatgatcgacttcctcgcgtggcagcagcgtatcggcctgatcccgaacgacgcagatctggaagacgttgaacaggagctgaaagacggtgccgaagaaacgcagctgatcttcaacgcggctgctcgccagacccagcaggggctggacaacccgcaggaagataaagacccggaggaagataaagacccggaggaagacaagccgatctctaagaagaaggccagcgcgccgaagaaggaggctaaatgacatccgttaactcgcggatggcgtcggaggcggtaaggcaccgcctctacctctaccgctacagcgaaggccaggcgaagaagatgacccagctactgcgccgaatgtccgtggacgtggtcggccgcctgctgtacgcgctggacgactcaaagatctccgccgacaactacacggtgaagcgtcttgaggccatcaaagcagccattaacccgacgatcaaccgcatctacaaaaccacctacggacagctcaaagccgaccttgaggcgctgagtaacggcgagctggcgtaccagtaccgcacgtggcgaacgctcatccctaacccggtgcttgacttcgttggtgggctggtggagatcccggaaacgcaggtatgggcagccgcgaacagtcgtccgttccagggcatgcttcttcgtgacatcccgtcagtgctgggtgaggccatgaccgactcgatcggtcgggcggtgcagcagggtatcttacagggcgagacgtatgaccagatcattcgacgggtcaaaggcagcgcagcagcggcctacaaagacggggtgatcggcaccaacgagcgccaccttgccaccgtcacccgcagcgcagtgtcgcacgtcgcagctgaggcgcgggacaagatcggcgaggccaacgccccgctcatcaagtcagaacagtggctttctacgctggacaataagacgtcgaagctgtgcatcatccgcgatcaactgctgtacatgcgggacaagaagcacacgccgatcggccatagcgttccctacggcgctggcccagggcgtctgcacatgaactgccgaagtacgtcgaccttcgtgttcaagagctgggaggaattgggcgttccgggagtcaagatcaagggagcgtcgcgcgccagcatgaacggacaggtgccgatctacatggactattcgagctgggtggagcgccagcctatgagcacgttaacgcaggtgttcggcgtggagcgggcgcagctcatccgcgacggtaagatctcgccgcctgacctgttcaacgacaagggggagtatttaacaatctcccagcttcgcgatcttgaccgtatcccggcagaagactaacatcgtgccgttgacaacacaggagctatcacatgtggaaatacctgattaacaaagaagcgtttgacgccctcacccctgaacagcaggctgcatacaaggccgtcggtgattctggcaactacgtgatgaacatcgaaggcatgcctgacgtgcaggccatgcagcagcagatggccgatcttcaaacccgcctgggcaccatcgacgcagagaaggccgccgaagcagagaaggccagacaggcagcgcttgacctggcgaagaagaacggcgactttaagaccatcgaagaggactataagcgccagatcgccgacctgaacagcaagatcgagggcttcggcaagcagcgccgcgacgacttcctgaacgcgcagatcgataagctggcagcagagctgggtggcaaggagtatgccgcgctgttcaaaccggcgttgcagcagcgcctgtctgtcgagggtggtgaagatggctccgacttcatccctcgcgtgctgaaagacggcaagccgtcggcgatgtcactgaacgacctgatcggcgagttccgggcagacccgacttacaagccggtgtgcgtagcgcctgcatcctctggcaccggccgccatcaggcaccgaccccgacgccttctgcttccgacaagctcccgagttttgaagatgtgcgcggtaagcagctgagccgcgcagaacagatcgcggcaagcatcagcgacgcagagtaagtaagcacaggcccggcattgccgggctttttcttgcttgtccagtagttgccggttatcatccagacgtttaatcactcaaaggacatcgcgcgatgagctttactatcttccaacgaaaactgatcggtacgaccgttcagcttctgactgaaaacctgaacgtgttcaacgcggcttccggtggcaccatgcttatcggcagcggcgaggttatcaaggaaaccatggagaaaatgaccattgggatcattgacggcctggtgcaggatcgcaacgaacacgcccccgttaacactgtggttcagccgaaggtgctttcccgcatcctgggcggttccatcaactccgctggccgccttgggccggtagccatcacctccggccagctgcgactgatcgagactgacgtgaacctcgcggcagccgagatcgcaaccctcgcgtcggaagccatgctgaaacgctacgtgaccgtggcaatgggtgctggcgtggctgcgatcgaagcgttcggtcagggtatctatacccaagacgctcacatgaccagcaaggccggtgaactgtatcctaccatcgaagacttcccgctggcggcgtccatcttcggcgaccaggccgacctgattcgcacctggttcatgtccggcacccagtgggcgaagttctccgcccgtgaagcggtcaagtccgccaaactggtgtttgagctgggcaacatgaagatcttcaccgacggcttcggtcgttcgttcgtggtatccgacgcggcaagcgctggcatctccgcggcgacctccggcggctccgcgatctacgcacctgatcatgcgattgttggtctggccgccaacgccattcaggtaacgaccaccggcctcaaaatggctgctgacccggccaagctgggcggcgagaacattgaaagctggtggcaaggtgagttcaactacagcattgctctcaaaggcatgcgtcctaccatggcgttccgcaccgccaccgaaggcaagaaaactccgaccatggccgaactggtcaagaaagagaactgggaagccgagaagggtgaaaccgaccgcaagccggttggcaacgacgccgatccggtggtgccgactcgcaacgtgcgcgagacgctggggatcattatgaagctgaccccaactaccatcccggcagccggcgctggtgtgtaagcgaagaagtgaataatatgggggccgattggcccccttttcattggagcaaaatatgatcggcaatctggacgacctgaaagcattcgcggcggccaacggctacacgggaatgactgacgaagagctgagcaccgcgctccgccaggctaacctgtggctgtggtcactgtcatggaagggcgagcaggctgaacccggacaggcggacatttggccgcgcactatctgcgacgactacaactgtctcgactacgacaccccaccggaagtcctccgctttacttacaccatcgtgtgcgacgccgtcgactctggcgcggagttcaacaccgcatcggctggcgcgcataagaaacgcacccggatcgagggcgcgatagatgtcgagtacagcgagcagagcctatacagcgcaggcttcgaggcaccctacatgatgggcatgatcgggcactggctggaaggcaacgggcgcggctgtaacgtcaaactggagcgcggctaatgaacaagctctatcgcgaactgcgggcagaggcccgcaagctgttcaaggagtacggcgcagtcatcaccatcagcaccacgggcggcatcagccgcgacccagtcaccggcgaggaagtggtgacgccaccgggcgcggtatgcaaggtgctgggcgtgatcaccggcgtcgacctcaagttttgggggctggcgaccatcccgcccggggagcagcagatcgtcatggcgtggacggacaccaccgggaaggagtgggagccgaagatgaatatgaccgtctcaggtggtggccgcacgtactccatcaccgagattaagccggttatcccagacggtggctacggcatcgtgtacaagctgaggatcaaggggctgtaatggcaagcaagcggaacggcacaatcttcgccaacaatgtcgctcagtgggctggtggggtcgtcgagcgtcacgaagagatcgtgcagctggcggcgatgaaggtgtttgcgatgatcatccagcgctcgcccgtcggcaaccctgacctgtggaaccgcaaccagcaggccgtcaaggagcgcaaccgcatgagcgacctacgaacggccatgcgcgaaagcgacaccttcggctacacgaccaagcgcggcacccgccgcctcaagccgggcgcgaacatcgttgcagctccggcgaaattctcttcccctgtagggccagtcggccagcgcatcccccgacttctcaagaatgagcagggcgttaacccggtcgggaagggctacgtcggcggccggttccgggctaactggcaggtggggatcgactttgtccctattgagtggctggatgaacgggacaagtcaggcaccccgaccatcaacaaaatggtgaacgccgtcgagcgcttccgcgtcgggatggctgagcatatttatttcgttaacaattcgccgtatggctacccgctggaatatgaggggcactcacgacaggctcccgccgggatggtcaggatctcatgtatccaatttgaggaagcattcgcggcagcaacagcagaggcacaaaaattatgatcagcacttcacagattcaggcgaaattcgacctaatcgcaatgcagtggggtagcaacaacaatatcgccctcgtgtggcgtaacagcgccgataacgacatgaacgagcaggcggtgagtcagctggtcggcttcccgcagcacatcccggccccgtctatctccatgggcttccagcagtcagatatctcgaagcgcgggatctatcaggtgatgctgcgtgctcctcgcctgtcaggcacccgtcagatctacgacgctgccgacgcgttggtagaggcattcaatgaagcaatgttctacgacggaaattatgttagcatcggcgacgacgatcagcagctataccttaccgctccggccgaaatcggtgctgactatgaggacgacgccgggctgcatgtggctgtcacgatgaactaccgtatcaacaacgtaagaggctaacatggctacgaaactctcctacaacatcccgaacggatccacgctgcaaatcgctaaaacgatgggcgcaagccttgccatcactggcatatcaaacgagaaggaggctgtcgccaccctgtcagtagctgattctagcctggccgcaggcgactacgtgcagctgtttaccagctgggtcaatatgaatggcctggtgtgtcgcgtgaaatccatcgccaccaataaagtgacgctggagaagatcgacaccaccaacaccgacatttacccggcaggtggtggcgctggtacgttggttgagattcaggcgtggatcgacctcccgctgactcctaccatcgccaacgctggtaacgagcagcagaccaccacgttccaggctatccagcacgagcgcgcggtgaacatcaacacctacaagtcggcggctacgcagaccttcaccatggcgcacgacgccagcgcgccagtgcgtgaagtgttgaagcagctggatcgctcgcaggacgtgacggcgttcaagttctacaacaagcgcgcgaaagaaacgcgcgtttatggctgccaggtatccttcaacgagatcccgacatccgaagtgaacagcgtcgaaacgaacagcctcgttctgagcctggtcagtgatatggtgatctatcctgccgcgtaaagcgtgctatcatcagggcggcttaggccgcctttttcatatctggagacaagacaatggctgcaaaattcaagttagtacccgctggcacgttcaaacacacgatcgaaatccccatggcgggaaccgatgagctacagaagctgcaattcacgttcaagcgactgaacaccgaccagctgaaagaagtgcagaaggaattcgaagcgcaaatggccgaactcgaagagaagtataaaaacactgcgctttcagccaccgagcgcgacgtactgctgcgccccatgatgatcgactacatcatgaaagtggcggaaaactgggagctgaccgaggagttcgcacctgaaaacctgaccgttctgctggttaactacccgcgcgcgttcgaagcaatcagcatccagtaccagcgcgagctgtggagcatccgccaaaagagttaaccgccgcgattgagggtttatatttccccgatccaccgcagcagctggtcgacaacttcgggggaacgctggaggactaccgtccagaagtggagctatcagcagatattgttgatagcttttatttttaccagcgtattgatacccaatggcgcacggggccgggcggtttaatcggcctcgactacacagtgatccccatcgtggcgaagatttacaacgttgaggttagcgcggagttaatggatgatattgccacaatggaggcagcagccattaaaaccatcatggggaacgttaagacatgagcgacaacactgaacgcctaatcgtcgacgtcgacgcgagtggggtcaatgccggggcgaagtccctggaagacctcgttaccgcagcgactggcgcggggaaggccgccgatgggctggcggataagttcgatgaaacaggagcggcggcaaagaaagcagccgctggcgtcgatagctttaacgacgaagcaaagcagaccgaagaggcagctggtgacgctgccgtggggctgtaccggcagaaccaggagttccagaagttactggatcgcatcaaccctactcgcgtaggactgcgtgacctggctgagcagcaggcagcactggcgaaggggcaggctggcggatttatatccgccaaagaggccgagcaatacaaccagatgctgaaagcgcgcgaggatctgctgaaaaggaatgaatcagcgctcaaagggtacgggtcggcagccagggacacaaaaaccctacaggacggcctgaccatcagcacagggcagtacagtgccgcgatgggcatgctaccggcgcagatgactgacgtgttcacgcagttagctggcgggcagaaccccttcctgatcctgatccagcaggggggacagattaaagatagcttcggcggcgttgataacgtgctgacgatgctaaaagatactgtcattgattccgcgatgtcccttggtgagctgaaatcagcgttcgctgacgttcgggacatgtctgacgcggccttattgcgatttggccgggctgtaaccgtcttgggcgctggcctgctgacagtcatcgccgggctgggatatgcggcctacaccagcagcgaccagaccgaccgcctcacctcttccctcatcctcatgggcggtgctgggttcacttcggcgaagcagctgaacgaagcggcggaatccatcgcgaataagaccggcagcagcatcagcgaaaccattgacacactgatcgagctaaacaacaaaggcaacgccactgccgagcagatgacccgcatcgccaccgctacccagaagatgtccgacgccggtctggatgctggcgacagcatgaagcagttcgactcgatcatcaaagacccggtgaagggtctggcgaagctgaacgagcaatatggcttcattgatgagaaggaaatgaagcgcttaatcaccctgcaaaaaacgaagggcgatcaggcggcagtcaccgaggcaatcaacatctacgctaacgcgatggagaagcgcagtgatgacgtcgtggatgcaacggacaacatcgggcaggcgtggaactcccttaaatcaggggcttccaacgtgttccgggatatcgggatcacgctgcgggcatggggaaatcaagccatcgacatcgtcagccttgtgaagctgtcgtttcaggatttgatcaataacctggagtcacttgattctaagttcaccgtcggcgtgtctaacatgctgagcaagatccccggagtggacgggaaaggcgtcctgtcggctatcgggatcgacgtcgatgaggtggagaagcgcgggaacgagtctatcgccaaaggcaagaagatcgccgaagagttcgcgaagattaagaacaaggtgactgcgcctaacgcgcaatacatctatgaacaggaagttcgcgaaggtggcggcgttgccgggtctggcggaacagaccagaagtcacgcaatgcggtcagcaagctggcgagtgagtcagcgaagcacaacaaggagaaggccatcaccgttgcgcagggtgatcgcatccttgagcagtatcaggcgcaggagctggcattacaggcgcagatcaagacgctgaaagaccgtaacgccttcgacgtcaatgcctccgagcagatgaagaactatcagctgttagtcgcgaagatctccatccttgagggtatccgggccgacgcaaaaggccgggcgctaaccaaggacgaacagtcgcttctggcgagcaaagaggaaatccttgcaaaagccaagaccgtcggactgctgggcgatcaggtcaagcagcttgaacgtcaggcgcagatcaccgatgagctgacccgcagcggcaatgacctgtctgttcaggtggcggccattaacgcctcatggggtctatcagccgatgaggctgcgcggctgctggagaacatgcagcgagcggcggccctccgggacaaaggcgcgactcaggagcaaatcgacgaggacgcacgccagcgtgaagcgctgcggcaggctaccgacgcgaaaacgcaggactgggcaggcggcgcacgctccgcgatcgaagcgtggggtaaggatgccaccaacacctcagccaacgtacagaaggccatcactggcgcaatggatgccggtctggactcgatcaactccttcgtgatgaccggtaaggcgtcgttcgccgactttaccaaatccatcctcgggatgatggttcagatgatcaacaaatggctcatgttcaaagccatccaggggatcggcggcgcgatgggcttcgatatgtccagcatcggattcaatgcgaaggggggcgtatacgacagcccgtcgctgtctgcttacagcaaccgcgtctacaccacgccgcagctgttcacgtatgacaagccgaagccgtttgcgaagggcggggtgttcgccgaagccgggccggaagccatcatgccactggcgaaggattccagcgggcgtcttggtgttcgtgctcagggcggtgccggtggcggcgtctccatcgggtcgatggaagtgaatgtcgaccagaacgggcaggcgacggccaacgtgtcagagtctggcaagctgggccgagcctacggtgatgcaatggccgcagccattcaggacggcatcgcccgtgcaagctcaccgggtggacagatctggatgcttattaacggtcacgcgtgataacctacagcctcccacacaggaggctttttttatggctacattagacgcgtggatctggccgctggcggcaggtcaacaggtatcagtgaaagaccgcagccgatcgaacagcttcggcgacggctcacagcagaacgttttagaaggcatcaatccgttcattatggaggtgccctgctcgtggactggcaacgccaagaccggcaaccagatcctatccttcctgaaagcgcacatcaccaacccgttccagatggttccgccgcatggcgaactgggcctttacaccgtgaaatcaggcacgatcaaatatgtcgcgctgggacgtgcaaccatgaacattaccttcacagctgagcaggccgtgggcatctacacaggggtgaaaggatgagcaacaccattttcgacgaagccacaaagctcgacccgtctggcaagatcattctcatggagatcgatggaaccgagttcggcgcggggatcatccggggccactattgccagctcccgcacacgagcaaggagatcctcgacagcgcgaacagcacgttgacccgcgatcagctgttcaactgcaaaagcgccaatacgcgcggcaccgtcacgacgaatgaagaccgtaacaccatcaactttaagtcgctgggcgtcgactcgaacctggttttgcctgagttctctggcggcctgactggtggcaagtatcaggtgatcgaggtggttggtcgctgggtgactccgccgccatcaactgacaaccagtatcagatctactacaaaaccgcagcgcatgatttttctcccggctacaacaagggcggggcgttggcgagcgtaaccgaagatcttggtgatggctggctgaaattctcgttcgacatgtcgaagctgagcgctggcggttcagactgggtaaacagccagattatcggcatccgcattgacctgtggcagcaggcagtcggtgagatcgagatcaagcgaatcagcatcctgaacaagaacccgcacgaggttgacgcgtccaagctggcaccgaagtcaatctggttcgacaacgtcgaatatggctattggccgtttatggctgaggggatcgagttcagcagcgagcagcagggaacgcctaccctgtccattggcaaccagtcgggggtcgtcagcgcctacctgcgcgcctatcagcagatggttggggcaaaggtcaagatcatccagacctacgcgaagtttctcgatccgcgcaacttcaccgatggcaacgagttcgccgactcaatgcagcagtggacgcagctttactacatcgatcggccagactatgagggcgaagagtatgttcggttcgcgctgtcgtcgccgctcgacctacagaactttcaggtgccaacgcgcagcatcacgacgttctgtcagtggcaggcgcgcggtctttacggcaaaggcctggacgcctgggaagaaaacgggtgcagctggaaccgtggcacagctaaaaagtggtacgacaagcacgggaaccaggtggacgacatcacgaaggatgagtgcggcgggtgcattcaggattgccgcctacgcttcggccagctggtgagtgacccaaaagcggccgttctggactacggcggttttatctctgtgcgccttattgattaaacgcgctgtatcgcgttctgcggcgttttcttgcgtaagacgtccgaacgtatggcctgacggcgttaaacgcggcagcgtgccgttcaggcctgtagttttcgacttacgaagataagaatacatcccatagccatatataataaaaaccctcccaagggagttttatttatatggtcttgggtatgtcttatatgtatttatgataataaatatatatacccataccacctaacacctgaaattcagcattataaatcaatgatttaaaatttcaggtggtgccaagtggaggcaaaaatgattgacgtaaacgacatcccggaacagcaattaacctatattaaacaacaccttacagagtgttcaccgcaagaaggctgcgggctgctggtgaattcaggcggaggcctcgaatactggcctgtcatcaactcagcagccgacaaaatgaacagttttcgcattgcaccgcaggacttcgctgaggctgaggaagcaggcaatatcgttgccgtcatccattcacaccctggcgctgacggtctggcgtatccgtcaatcctcgatcgccagctcatgcaggaaacttgcttaccgtggttcatctacgcccaggacaaggatgagatggcggtgttctttgaggagccgaaggggctgctgggtcgtgacttcgtgctgggtgcgaccgactgctacggcctggtgatggcgtggcaccgttcgcgaggcattcagcttcctgacttccgcaagccttacccgtggtgggagaagggtgaggagcttttcacggatgagaattttacagcagcgggatttatcaagaaggccgaggcagagccgggcgacatggtggtattccgtatcgcgtcaagcgtaagcaatcactgcgggatctacaccggcgacgggatgattatgcaccacctcatgaaccgcaaatcgaccattgataggatgtatggcacctaccttgagccgcgcattactggtattctccgacatgagttactaccggagatcacaccatgggaaaccagctaagcaccatccgactgtacggcgaaatgggggcgcgcttcgggcgcgtccatcaccttgcggtcgactcctgcgccgaagcaatcagcgccctttccgccatcctccccggattcgatcaatacatgcgtgacagccagtcgcgcggcctgaccttcgccccgttcatcggaaagcggaacatcggcttcaatgagatgtcgcagccaatccctgacggcgaagaattccgcattgccccgatcatcatcggcaacaagaagggaggcctgttccagaccatcctgggcgctgcgatgattgtcgcgggcgtcgtggcgtcgttcatccccggcgggcaggctgtctccccttacctcgttgctgctggtatctccacggctgctggtggggttatgcagatgctgtccccccagtcgacaggcatgaagatccgggaggatgacgccaacgcgccgtcatacgccttcggccagccggtcaacacgacagcacaaggtaacatcgttggcgttttgtatggcgagcgtgagatcgggggtgctatcatcagcgccggaattatcgctaacgaggtacgttcttaatggaaatcaaaggatacaagggcgggagtagcaacgtgcatacccccgttgaagatccagactccctgatcagcaacgcaacggtaaggatgctcctggcgttgtcagagggtgaaaccgtgccgattagcgcggaagacctgccaaagcgcgtctatctggacgggacgcccgttcagaacggtgacgggtcagtaaacattccgggcgttactctggaatatcgcaacggcaccccgcagcaggagccgatcaacggcttcccggcggtggaaagtgaaacacgaatcaatgtggagctgaaaaagtcggctgcatgggtgcgcaacatcaccaacaccgagatcgacgccgtccgcatccgaatgaatttccggctggtcatccagcagaaggacggggatcgcgtaggcggacgcattgagtaccggattgaataccgcaaagtcggcgacagcgcctacaccgtggccttcaatggtgctgtcgacggcaagcagaaagacaactatgaacgcgatcaccgcattgacctgccgaagagcagcactggctggcaaatccgcgttacccgcctaactgacgacagcacgtcggataccaccgtgctcaactccgggatcgtggctgtcaccgagatcgtcgacgcccgcgttcgttacccgtggacgtccctactgttcgtcagcttcgacgccaaatcgttccagaacatcccgacaatcagcatcaagatgggcggccgtctggtgctggttccgtccaactatgaccctgttaaccacacctacagcgggtcgtggaacgggacatttaaacaggcgtggacggataacccggcgtggatcgtctacgacatcattctgcacaagcgcttcggtattggccgccgtatcccgtcctcattcctgaacaaatggacgatgtacagcatcgcacagcgctgcgatgagctggtgacgaacgccgacggcacgcagaaccgccgttacacctgtaacgtgtatatccagaaacgcgagcatgcgtggatcgtcatccgtgacctggcgtcgatctttaacggaatggtcagctacagcaatatgcaattgcagttcgcgcaggatgcaccggcagaagtccgccatgttgtgacaaacgacgacgtcgtgaacgggacgttcgagtattcctacggcagcatggctaaccgtcgcgggatcgcgatggtcacttttgacgacccgaaggcgcactataagacgcagaccactgtggcgcagatcaaagacctcgtggagcgctatggcgttgagccgctggaagtgtccggcatcggctgcacggacgaatacgaagcgcaacgtcgcggcctgtgggcgctactgtcgaataccaacgacatgcagatcagctaccgcgtcggcctgagcggcatcaagtacctgatcggcgacgtcgtcggcatcgctaaccgctacgtgcagggcggtcagttcggcgggcgtgttgctggcgcatccggcaccaccattacctccgaccgtatgatctccgaccacgtggcaatcggcgacagagtgatcgttcgtcaagctggatcggatggaacctacaaccgcgtgatcaatgcaatcgcggctgaccggatgtccttcaccgtcgacggcgctaaccttgatattcagagcggtgaagtgttcctgctggatactaaggtactggcaccggaactaatccgcatcaccaagatcacctacaacgagcaggacaataatttcaccgttaccggtctgcaatacagccactcgaagtatttgcaggttgacaccggcgcgcgaattgaagaccgcccgacatcgctgatcccgaccggtcaggtacaggcacccgctaacgtggtggccgaaggctacagtatcgttaaccaggggattcgctcagctaacgtaaactgttcatggttcaccgtagatcaggccgtcagctacgacattcaggtgcgccgaacctctcagtcaaacggccagtggtcacaggggtggactaaccttgccagccagtcgagcacgtccgtagacctgaccaacgttctgaccggcacctatcagttccgcgttcgttccgtatcccgtgacggcgggtcgtctcagtgggtcgagtcgaatcaggtgttcgttgacggcaagcgcggcagcatcccggcagtagctggcctgaacggcgtaggcatcgttaacggtattacctggcgttgggtgactggcactgatgatctgatcgacatgaagtcgacagagctacagttccagcgcattgacggcaatggtgctccggttggtgggtggatcgatctcagcgtcgtgacctacccgaccgggacgttcacacagtccggcctgaaattttccgaacgcgtgcaggtgcgcgcccgctttgtgtcgtcatatagcgatgctggcgagtggagcgccccggtcatggcgatgacgtccgacaacatggacgactattaccagaacatcgacgacgcgatcaaaggctccgacacctacggcgaacttaccagcggcatcaaagacgtaagcgacagcgcacaggcagcgaaagacgccgcgcaggccgcgcaggttactgctgacggagcagtgacaaccaaccagcagcagcagcagcagctgaacaaccagctggccgagatccagaagaacgcgcaggccatcaccaccaccgctaacgcgggggcggcaaacgccagtgcaatcgctcaggagatccttgaccgcaaggctggcgacatcgcgaacgccaacaaggcagctcaggacgtggccgacgctatcgcgaaggctgagacggatgacgcacaggtggcagctgacgcagcggccaacctgctgacagcgaagaacgaagtcgaagcgcagatcagcaccaccaataccacgatgcaggacggcttcgacagtctggctcagcagatggcatccatttccgctggtactggcgagcagttcgacagcctcgctatctggtatttcgacaacggcccggaagggtgggcttctgacgacgccaacaccaatctgctcaccgtcgaccaagatggctggatttaccctgctggcgcagcatccaccatgcgctcacctaacccgctggcaatcgacgcgcgcagctataagtacatgcgcctgcgcatgaagcgagtcgggaacccgtcatgggctggcaagctgtattggatcggtgttgatgagactggctggacaagtacccgctcgcttgctatcccagcacctgactttgacccgaccaccgggatcactgtcctgtcgctccctgatctcctgtgggcgacatccggcaccgtgcgccgcctgcgctttgacttctcaaacaatcaggactccaataactactacgcgatcgactggatggcagtcggccgaccgaccccgggcgcgtcacaggcacaggttcaggatcttcgcaccgccatgacctctgcggactctgccgaagccgcagcgcgtaacacgctggccgtacagcttcgcgggaactatgagggaaccgacccttcaaagctggtgactggcatcatcttcaacgagcgccagacccgcgtcaccgcagagcaggcgatcgccagcgacgtcaacaccctgcgtactgactacaacgcgaacaaggcctccgtgacccagcgtctcgacactctgaccagcgaaaaccagtcgcaggcgcaggcgctcacccagcttcaaagcgacctgaccgacgcgaacggcaagatcggcgctaatgccgcggctatcagccagctcaaaacagacgttaccgctctggatggtcgagtgacggcaaacagcagcctgatcaccaacctgcgcagtgacctgaataacatgcgcgtcggcggcaccaacctgatccctaactctggcacgctggcaggcgtcagcggcgttgtgcagggtcagacgtacaaaggcaatgctatccgtcgcatcgcgattgcagcagcctcagctggctcctacgaccaatttgagtatgagcttgcggctcctatcgacggaaccgaagtagtcgtcagcttctacgcgaaagcgaacaacgccgacagcaagcaaattttcgtctacctgaacaacccgaatgccacgcttacggctttaagcagtcagggtaaaactggcagctgggctactggtggcgatggttcgatgacaatcgaccttacggaagactgggcgcgctactgggtcaagtacacccgcaagagcggccagacaggcacccagcgcgtcatctttggccgactgctgaaagggtctaaggacaaagaggtttacatcagctcgcctaaattagaatacggcaccatgcctaccgaatggagcgaagcaccggctgacaatgccagcgcaagcgcgttgcaggcactgaccacgcgcgtaactgctgcggaaggcaccatcagcaccaacagccaggcgatcaccaagctcaaaggcgacgtgagcaccttgcagggtcagatggctaccaaggcagaagcgagcgcattgcagcagctggctaccactgtcacccagcaggggaacaccatctcatcgcagggtcaggcgatcaccgacttgcagaacactgcacagaacggtaaagcgaactactggctgaccaagatcttcgacattaaggttaataccggctacgtgccgaagttaacagatctcgcaggcgtgccgccgctggccgtgtacgagatggctgacgctgcaaagctagacttcctgacttacggcgactacaaaatcgcgtatgtgaaggcgctggtgtatgttgcggctgataagaccattgctatctcgcccggttcccgcatcatggacgacaccggcaggctgtacatcaatggagcggaagcggcttccttctctgccagcaccagcacctacagcatggcgctcaaaaagggctggaacacgcttgagttcgttgttgcgcagtacaccggtcagttctatatcaactttggcctcaagctgtccgacaacgtcgatcagctgttcagtggtgccggtcagctggccgctgcatccgcctcgcaggtgctctcctctcaggttgagcagacctccgggaaggttgacgcgaacagtgccgcgatcgtcactctgaacaactcggtgcgggacatcaacaccgcgctgaacaacaaagctgacgcgagcgcgttgcagtcgctgatcacccgtgtcaccaccgcagaagggaagatcactgcgcagggcaacgcaattacccagctcaccagcgatctgtcgacagcgaacgggaagatctccgctaactcaacggcgatcaataacctgacgacccgggtcagcgcagccgaagggaagattgactcacaggctgagtccatcacctcgatcaactcatctatcaatggcgtactgacccaagcggccaaccttatcccgaacccgacggtagacccggcctacccgcaaatgggcatgaccgttgtttccacaacgtcagaaggcgttccggctggatgcccttacccgtgggcgattaaatgccagtaccgcgatcacgttccggcaatgaacaacatcccttgtcgcgaaggtcaggtgtttgagttctctgtactggccgcgtgcggcaccggctccgcaccgttccagcactacatcgggacgtctacgctggtttctggcagcgtcgggtcgccactagcgaacggaggccaaatctcagcggctaccggcgcgcagtggacgcgcaccacgtggcgctggacagtaaacgcggcgcagggggcgaagggttacttccgcccgttcctgcaaatcaaccagtccggccctaacttcgggacagtctggtatgcgaccgactggcaggtgcgcgacgtcaccgcagcggcgaatgccgaaggcaaggctgacgccaacgccacggcgatcagccagctgacaacccgcgttacttctgcggaagggtcgatcacgtctcaggggcaggccattaccaaactgaccagcgatctgagcacgctgaccggcatcgtgaacaataaggcggacgcttcggcgctgaatgcgctcactacccgcgtatcgactgccgaaggcaagatcgattcacagggtcagtcgatcacccagctgagcaatagcctgtccgcaactgacgcctcaatcgacgcgcaaggcaagatccccgggaacctgctggctaactcatcttttgagcgcggcccggttaacttcaccggctggagcagcattgccaccatcatcacggcaacgcagccgcactctggcaccaagattgccaagatggcggcaggcgaaagtgctggaatcagccaggctgtggagatcacgcaggggcgtcgctaccgcttcggtgtgtttgccaaacaggacgccggtactgtcatcaacgatacgaataacacgaaattccgtatcgctgacgcatcaggcaatcttcttgctggcacgaattacggcccgtttacgtctgaatggcaacacgtcttcatggactggacggctacgaagaccaccaacgcgctgtttcagctgactaccgcactgagtgctggggcgatgtatttcgacgacgtctacgttgtcgacatcaccaacgacaccaagatccaggcgaacgctgacgcgatcacctcactgaacacgaaagtgacccagcagggcaacgacatcacgtcgcagggcagcgcgatcaccaagctgaacaactcgcttaaaactgttcagtacagcaacagcaacccgtgggtagatggatcattcgagtcgtatgacaaccagcaagccatcggcggatctaatggactggtcactactgacttctcattcagtggtcagaagtcgcttatgtgtcgccgcgccaacggtgaatcaggcaactctgacaagactttcggcaatgaaacagccattcgcgagtctgcggtttaccgcttcgaatgctgggcgatgatgccggaagatgagacgccgccgaacgggtggaactgtgttttgggcttgatggttcgcacctcagacaaccagaacgcatggcctagcgcattcgtcatcacagagtcagggcttgctgctggtggtggtcgtggtaagtgggtcaagttctccggcaaggtaggcgtgggcggcggacagaagacacgaggccgtctgtggatatccactcgcggcacatccggcggccctggatatcgcatctatatcgacgatctggtgatcaccgacgtaaccgacgcgcacgcagcacagaccacagcagacgctaactcaagcgcgatcaatagcctgaccagccgtgtgagcaccgcagaagggcagatcacatctcaggcagacgcgatcaccaagctgaacggtgacgtgagcaccatcaatggcacgctgagccagaaggctgacgccagcgcagtcacctcgctgcaaacgcgcgttaccaccgcagaaggccaaatcgtgagtcagggcagtcgcgtaacgtcgttagaaaatactttaacggtgggcgacaacattgttccgaactccgcaatgctgaatgacgctcagggttggggtggtcatgcaacaactgttgacggttatccggctgtgatcgacacggcagcatggtctccaacttcacctaagttttccgtaacacctggcgacattctagactttagtcttctttgtctggctggtgccgcaatcaacggcatggcatggggtattcgcttcgatggcccgagcatgacgaacaactcggtctacgtggagccgttaaactatgcagctggcgagaagaaatccgtaactggaaccatcactgtcccggatggcgcgacaactggctatctccaaccttatagcagaaacgccattaccctcacgatctataacattaaagttacccgcagaaatgccggtactatcgctaactccaacgcgatcaccagcctgcaatcgactgtcacccagcagggcaatacactgacctctcagggtcaggcgattaccaagctgaatagcgacctgtccacgacgaagggcgacctggcggccacgaatgcggaagtggccaaaaaggcgaatgcgaccgcgctgaccgccctaaccaaccgagtgacgtctgctgagggcagcatcacttcgcaaggtcagagcatcaccagtctacagaacagcatcacctacggcgacaacctggtgcctaacccaggaatgctgggcgatgcccagggctggacgaaggccgggacggagaccatcgacggctatccggcggtgtactccacggcgagctataacccgacgtctgggaaattcccggtcacggcgggtgagacgctggatctggcggtgtcggtaatggtcaacatcgcaggcgcgataacagtcgggctgcgtttcgacggcccgagtgtcagcaaccagaccgcgtatgccaccatccgcaccatgaccgccggggagaaatatcgcttcaccctgacgggcatcacggttccggcaggctgtacgaccgcctacatccaggcggggatccacgccgccacgacccgcgtcagcctgtataacccggtagtgacccgtcggggcgctgggatccaggcgaacgcggacgccatcacctcgctgaactccacggtgacgcagcagggcaaggacattacggcgaacacgaccgccattaccgggctgacgagccgggtggggacggccgaagcgtcggtcaatgccctgaacgagacgacggcggctaacggtctggcgatggcgaacggattccagcaactgcgtgcgcagatcggcgacaaccaggcggccatcacgcagacgaacaaggcagtggtggatcttgagtcttcaacggcgcagcagatcggcacaatcaaggcgtcagtggatggtatgagttccaccgttcagcagacttcaacggctgttgcggatatcaacggcaagctgtcggcgcagtggggcgtcaaagttcagactgacaccggcggcggaaacccgcgcatagctggcattcagctgggcatcgacgcgagtggttcttcgcagttcctggttcaggctgacaccttcgcggtgtacgctggcggcagtaacaagacgttcccgttcgttgtgcagaacggcgtggcgtacatgcaggaagcgctgatccgcgatggctcgatcactaacgcgaagatcggcaacgtcatccagtcgaacaactatgtcgacggctccaacggctggagcatcaacaaggacggtggcgcgcagttcaacaatgcgatcttccgaggtcacattgaagcgcgtagcgggacgttcaaaggcacattgcaagctgagtcttttataggcgatattgctacttctgcatcgttcaacggatttactgtcaagggcggtgaaggttctggcactatgaacgcatggtatcagaatcgtgggtatccgatgaccatcacgctgaactgcactgtgcgatgcaactcctatagtggcggtattgcagaccagagaaatgactttttcgtggttctcacgttcaatattaatggagtgcagagtcaaaggcgtgtcgttgttgatatgcgggagaaagcgcgtggccttgtggatgttccgcaatcgttcaccgttaacattccagcaagtaacgaccgaatcggcatctcgctgactggcgaaagttatgggccgcagcagagtgaagtcacagtaagcaacattgttgtgacggcattccgaagcagcaacggttcttttgggcaataaggagcggcccttcggggccgatattgaatggcaacaattagcgaccaactcgcggctgatattcacaacgcattcagcaaatactacacagacctcgccaatcaggatcagatcttctttggcgttggtgacgtgcagatcaccaagcaggacggaaccaccgcaacagtgcgctcatggaacaaggtgatcggctcagtggataccgcagctcaacgcggagctgaaaacaccttcacggccctgcaaacgttcagcgccgggatcaatgtctctgccggaaacatcaacgtgatgaacgacaacagcatggtgatccttggtaaaaacagcgatcttgcactgcttaaaaagagcggtcagggcggcaccatcgccgtcggcagcggcacgccattcaggatccagcgcacgaatacagcaactgtctcaccggcttctacggtcgaggatattttgaccatcggcacggataagaaaaccacgctcaccggggcgcttgccgctggtggagatgtagtggctaaggggttgctgtatgcccaagcgattgagttgtcatttggaacgccatacatcgactttcattttaactacagcaccgacgacttcaccgggcggattgtagccactgccgccgatcaaattagtgtgcaaggtagtcatttgcgagttgacagggatcttcgtgtttttggtatggcagacattaaagggtgggcgcaatgcggcgtcgatctttcggccaacagaacagacttcggttcccctgctattggttcgttggtttcaggtggcaggattcgttctcgaatgctcgggcgcggcggtaacgttgacccatcaggggcgtggggcggtttctatgttgaggagtacgtgggaaccgaacacaggattatcatgtatatggacggcttcgggagaacagacgcatggtcattccgctcaggggggacaatctccacacccaaaggcgacgttctcactaccggttcagacgtgcgcctgaaaacagacttcaccaaagcgcctgagaacgcctcagagcgcattgaacgattaggggtatgtcagtaccgtatgaagggagaaagccgcgtaaggcgtggttttatcgcgcagcaggctgatactgtcgacaaggtctatacctatcaggacgttgagcaggagatcgacggcgagcgtatcaaggtgatgaacgtggactatgtggcaatcatcgctgacctggtagcgtcggtgcaggagcttcggaaggaattgagggagctgaaaggggaataaaaaaggggccatcggcccctttctttacagcacgtgataaagcacgttaatcacgaagcccaacacgaggccgatcgctgctgccagtaatggctgtttcattttgtcaaacacgttattcaccctctactttaacgagttcatgccattcgatgcccagtggcttcgcaaggcggatcatggtttcaatggtagggaactcacggccattgtcataacggcatacgcggcactgcgcaatgcctgctgctttcgccaggccacgctgggaaaatccagcgcgctcgcggtgttctttcaaaatcagtgtgatgttcattttctacctcagaacgggatatcgtcatcaaagtccatcggcggctcgctggactgctgctgtggttttgactgctggcgcgttgggccggaatgtgtcttcggctgtccctgcggctgcccctgctgtccgccttcgctcttgccgcctaacatttgcataacggcgttaggcccgttcagaaccacttctgtcgtccatttctcgactccgttgctgtcagtccattttcgtgtttgcagctttccttcgacgtagatctgagaaccctttttcacgtactcgccgacgatctcagccagcttcccgaagacgacgacacggtgccattccgtttgctcctttacttctccggtctgcttatcgcgccatgattctgacgtcgcgatcgtgaggttagccaccgcgccgcctgacggcatgtagcgaatttctggatcctgaccgatgcgacccacgaggatcaccttgttaactccacggcttgccatttataacgctccttaaaaatcttcttcgacgtctgattgctgcggcggtacatcttgcggctgaacgtcatcaggtgcaacctggacggtagccttaccgcgtttagcattggctggcttgccggggttgaacggtctggcctccgcgtttttcagctcgacgatcttgctggcgcgggcatcttcgacgatgcgcagtgatgccttgtcgctgcggaacagctcgcacgcggcgcggtagattgcatccacctcatccttgtccttcgcggcttcaatggagcggcggcagtcggctgcgctacgcactgatttgttgccgtcgtcgtcgtccatggtgaggccgaagatcgaaacgcgggcatagcggcgggcgtaggtaagcgttgagccgaagccctgggcgtcgttcttcgccagcgggatctggcagatatcggacagccattcgcctgtggcaacgtggatgatgcgcgtctccatcagcatcacgttcggagcctgtccggcctcgtgcgtcggagactggatcatgatcaacccggcatcttccattgccgggccgatggcggccgcaacgtctccgagggtcgcatagtggtttttcaggtgctggttctgcttggatttcttcggcgatacgcacatatcctgcgcgtgggcaaactgcttaacgatggtgctgcatggctgagaaaatttcatcatttggtcactccttatattgagggggtaatatgtcagtatattaccccggaatcaattattttttggttttcacatcttcccacaagtggcggaaggcgttttccaggtagtacggaggatcgaggtcaatcacgcttccgccgccgtaggtcggccacgtgtcattttcccggcaccatttaaatgtggcgatggcttcacgcagctgcgcatatccaatcatcagagttttgtttgacaaggcgaaaggagcgacgacgaacgggctgctcttctcctgcgccagcaacatcgtccttctcggtttctggccgaaagccgccttaaacccctcacgctgcaacgccattttcagcggatacccgagatcgaagcacttacgcatgaatctttcagggttggccgtgtccgtggtcttgtagtccaccatgtcggcgaacttgctgatccagtcgaggcgcaccttgcaacgcaatccctgatagctgaaaaagatcgagacttccgacattccgtcgacgaaatactctttaaacgagtcgttattaaacagaacggcgcgcatctcctgaatgatgtcataatcctgcccgcgaatgccttcacgatcaccgcgctcttcattggcctttttcacgatgtcgtgccagaaaacaacgtcagttatcccaagagctgcggcggtattggtgactgtctcaattaattccggctctttcattttcgaataaccggcaaccccgtgttctttcagaaatgccttcgcggcctcaagtgaggtaataaagttaggctgcggaataatatcgccgttatcgtcacgcttaataaagtcctctttttcaggcatgcggaaatattcacgggcgaataattccggctcaaggtgattagcgtgggccgctgtaccgaagaccagtgcgcgggattgcttcttcttgtcttcggcaaatttccagttggccgggcagctggagaacaactcccacaagcctgagccgttcatgtggtctgtctcagcgtgatagtcttcgttcgacaggtcgttatttgtgaagaacagaacttcatcatcttttagcgatttaatatctgacattacatgatccccttattcatatctaaccgaagttttcgttcgatatcttcctgcctgacaaagcggcgtgaatcgcccttgcaattaactttcaatagccatttgcttttattttcaatagccggatacttcacggcaggatcgcggaatagaatctgaccaagcatcaactcggttccagtgggtacgccacaaaataaaacctcccatagcacgtccctgataagattatttcccggcgctctatatgtgagaaccactttctttaatgatcgcataaggccgtaagcctctttgaatgttttgcggtcagtgttgcgaatgccgccgtgcaatattctgtgtaactctgcatgtgtcatgatgacctcctgtgtggtgtttgggtatattatttccgcataataggccatgtcaaggctatttaactatgatggtcgacggcccgaggaagtcgatcaccgccagcttcgcgcagtgaaagccataagccaccgcagcgaagccgccctgagcggatacggcggacaggcattcaacctgctccttgctgactggcgtcgacagcttcttgttctcccgcttcatctcgatcaccccgaacggctccccgttgcggccacgatgcaggatcacgatgtcagcgacacccttgcgcagtcccttcgcctgctggcgcaggaaatactgcttcccggccttcccgccgttctcgttcggcacatggaaccagtacacgtctggataccaatgattaaaccaggtggtaaagttaaccaggtgatcatcctcaagcgctttcgtcggttcatctggggggtaaagatattctttaatcacaggtcatcacctccttcgaaaattttacgggctatgacgtcgcgagactttctgccgcctatacgccggtgcgtcacacgcttaggcgctgcaatcaggtgagcggacggcaggatcttcgtttttacccctttccgcatcttgcccctggtgttcggtgatgcaacgtgcttatccagtgccgccttccactgctgttttgctggcatgctgtcgctgtccggccaaaagacctcataggccacaaagtcaggatccccctcattccccagcacgtagcggaacaccacgccgtttccgcatttcgtcggttcaacgttgaaggatcgcacgtccacaaagtcatcccgtgtatagctctttttctcaaggctcctgtttgggtcgatcaacgtgttcccgcagtgggcgcactgccgggcggtgatgtcgttctccgcgccgcatccgcggctgacaaccacgccgcgatcgttcttaaagtcatcacatgtgcgcgagatgaaccagtggtgacagcggtcgtccttgcggtatggcgtgccgtcttcctcgatcccgtcgtggtcgtacacatggcggcaccggcgcgcgtgcttgccgttcgtgtgtccataggggcattccttcgtctggccggtgctggtgtccgtctcatagcggtactgttcaaggaatggcgagaagtacagttccgccaggtcgtccagcgctccaccgtagtcgagaacaaggttgtcctctttgatcatcccaagctcttcgatgtggaatttcttgaggatgcgcatcccgcgaccgatgagctgaaccagcagagtgaggctgccgatcttgcgcaggataacgatcgtgtcccatggcgggacgttgtatccggtggtaaggcaaccgatctgaaagataaatttgcagcggttgttgaatgcgtcttccagtatccggtcgcgctccttctgtggcgtgtcgtcggtgatgatcccgtaagtcacgccgggcggtaacgagctggccgcctccttgcagtgcttcttaccggcgcaggtaacgagtacgcagttacggttggcggtacgcttcacgacgtcgagcatgatgttttgcgtgatggttccctgggccaggatctgcttctccatctcgatcaggtcggcatcactgaattcgtcgtcaccctcttcgccgcgactcacgaaagaatcaagctggtaggtcagctcatcatcgatcgcaccgtaatgggtaggcaccaccgcgccaacttcaaccaggtactcagtggaaatgtcacacaccgcacgccgccagaatcctggggtgttcctgtcttcgttgatgatcggctgagtgcctcggtagtctgtgccggtgtacccgataacaaccagatcccgaccgtacatctcccggcaacggcgctgcatctcccggatgataagtgtgtacccggtgcggccagcggcgatcatctgcgccagcgtgcgttctgcccgggcctgcaacctctcgttttcaggattctgatccgcaagcgtgcaggtcatctcgctttcaacgatgtcgtctacgttgacgtgatggcattcgtcgatcagcaggaagcgcgccacgaagttagccagctgcttttcaagggcgttgaccaccgtcttctcgctgccgcaaatgatagggaaggtcgtggacttcatgcgcaggccagcgctgaacacgctgttctccaccccgaagttccgtatctccatggcgtcctgcttgatgatcccgccctgacgtgacaacactagcgcggtcttgttgagctgggtcaggcggcgggccaccaggctgatcagcgtggtcttccctgccgacacggcggccttgacgacgaacgggccgatctccttgtagttgttgatggcctgcgacgtcgcaaagtgtgccgcgaactggaacgggtaggggtcgtatggcatgccgcgaagtcctcgcagtagctggccgcgaaccgcctctatgtccgtctcctcaatcatttgcttgatgcttttcaccttttccattgttgcctcgttgacgtggtaaacattgcaatatattctgcacaacgaataccaaaacacaaggaatttaaaatgatgaatattggcaaactacccgaaccagaaattcacgagggcgcgatacagcgggcttttgtgcgttctatgggcaactcattccagatcatgatcccgaactactacacccctgacaacctgggctatgaggcggatatgttctgtatccgcaagagccgctacacggtggaagtggaggtgaagatctccattgccgacatgcgcgctgacttccgcaaggcccacaccgtttacccaaagacagcggaggaagcagaaaaatactggcgatcagacgaaaacgagcgcgtcccgtacccggtgaagatgaagcatgactgcctgaaagctggtgagctgatagccaaccgcttctacttcctggtgccgtggactatcgcggacaaggcacgggagatcctgccggactatgccgggctttacgtgtacaaccagcgcggactggtacacgaggaaaagatggggccgatgctgcacaagcgtaagctcgatccgaaatatgaccaggggatcatggccaacctcaacacccgctacctgaagctgtggaggaggtcatgaagttctaccccattgagcagatagaacgactcatggtcgggcgctgggaggttctgctatcccagtattgggataagcgcgcattcaacggcaggcatcaggcctgcccgctgtgcggagggaacgaccggttccgctggggcgaatcgaagcaggacgtcacgatgaagggtcgcggtgctgcaatttgcaaccagtgcggatcacacctgggcctgtggtggttcatgcaaactaccggctacgaattcccggtggcgctgcatgagataggggccaacttcctcaaggtcgagcctgaccaggaaatgacgaccgagccggtgatcgcccgcgacgcattcccgaaggctccgcgcgtcaggctggaagagaaaaacttatcagcctctcagaagtacatccgcaagcagcaggccgcgcctgactatgatcgccggttctggatggcctacgacctgatcgagacgatgcgcaaatatcacatgtgaaacacagttgacaggtatatggtgcccaagtaatatgcccgaacacccaacagaaggagcagaaaaatgtcagaacaaaccaccgtgtcaccgaagaccgccagcgcagtagcagaagaaatcaaaaaagctattggccgccgccgtatcccggtaattgtcgcagaccaaccggccatcgcgttcatgatcgccaaagaggccagcaaaacaggctacggcgaagatgagcagctgggagtgaacgccggattcaccgagaaggacgtggtgaaccagatcgctaacgccgcgctgttcagaaagtcatataaccgcgtccagcacgtcgtcgtcatcaagtcgagcaaggcggcagcggctggcaactttgatggccgctacttcgtgaagatcatgtgcaatcgcctgtatgtcaccatggggagcctggctaactatcttgcgggggcggaatagtgagcggggcaaagcccgtggtgattggctgccggaaaatgatcaaaggcagcgagcgcggaaagatggtctgctgtgggacatacttccacgctggcgggcgaagcagatgctggcacgtgatcgataatgtcgtggtgtgtaaacgttgtttcaaagagtggaaaaaggagcacaaagatgaagaaagcgatatttctgtttaaccgctcgcggcacatgttgcagccgtggttagacgctggctatgaatgctggacatttgacgggcagcttcctgacggtgttcacgaggttgagccgggattgatggcggttggcatgtggttcgacgcctcagctaccagcgtgcatgccagcgacgtagccaggatcgtaggtggtggcgtgaagttcatcgcctctttcgcggaatgcacatatctgaccactaccggcgcgcgctggctgtatcacccggaagatcgcgatcttccagttgctgagcgccgaccacacccggcatacccaaaccgccgccgggatatggaggacgctgtgaagctggcgaaattcgttgagctggtggaggcatattgccacatcgtcaacggtgatttttccaccggcccgatcccgtggatgctggagaatcctgctcgatcattcctgcctaagctgtggcgcaacttcaatcacaccttcaacccgtgtgactatggcggctatatcccggagggtgaagagatgcacccggactaccctggtgtcattcctgaccgtgacgcctacaccaagctgaccgggatctggtgcagtgaagcgttcgtgatgcccgagccgaagccggtggagccggtaggcaaggacttcaaccgggcgatcaaggtcggcggaaagagcacccgcaccaagaacatccgcagcgccactccgcgaggcttcgcgctggctgtattcgaggcaaaccaccgtgcataagttcattatgacactggaagattaccggatgtttgccactcgtgaagaacaccgcgtgatcagcgttgaagagccgccgattggcgatgcctgcatatcgtgtgagggccgccttgatattcacgtacaggtgatctcctgtcgtgaatggacgttaggcggtcagctgttttatgtgagcaaaatcaaatatcggtcaaataccccaaaggaaacgaaatgaaagacgaagcagacaacgtgactatcgacgcattcgacgcagaccacaacccggcactgcacgcggaagccgcagcaaagggacttactccgtggcagctgttcagcaatcgcgtatgggctacgaaggggctggtgactggcgggcactaccaggcagttcgcccgcagaaagtgaccggccgccggttcaacgggagcaagacccctgataacgtccgcccgaactggcgcaccccggagcacatctttgcatggctggacatgacttacggcccgttcgaggtagaccttgcggcctgcgagaagtcgacgaaatgcgacttctacttttgcaaggaagagaacagccttgcgcaagactggagccagtttgatgcgatgtttctgaacccgccttatgacgacatcacgccgtggacggagaagagccgcgagatcaagccgggcgcagtgctggcggtggtgctgccgaacgacaacagcacagtgtggttccgcaacatggtggatcaggcctacaccatcatcaacatcgtcagcaacggcaagaactctggccgcctgtcgttcgaacacgctggcaccgggaagccaggcaagcagaacaacaaaggcaccgtgctgttcattctgcgcgggcgtaagcgtcgcgccggtgtggagacgctctacatcgatcaggatcaaatgctgcgcgaattggggttactggatgcacagtaaggcgcaggtctggcaggccgcgaaggagtgcggcctcgacgaattcattaccgccgtttcaaaagcatttcccggcgcgattgacggcgtggcgatatctgcgaaagggatcggtgttctggcgactgacgaccgcatgctgcgcaggctggtgagggttaaacctggcgtgacgctcacaaagcaacaggtcaaggagataaggacgaaatctggtgttactatgcgatataaaggggaaaattgaggagtagcaccgatgggtaagacgtaccagcggcacaaggcccgcactgtatcacgggctgacaggctgcgcaggatgaaccaagataagaacacgcgagtcatcaccaaatacatcgccgggacactagcccggctaccagaaggagaagatcatgacgttagcacaggcaatcttgaaggcatcaaccgaagggcgagatcttaaagtaggaaagggcgtagatcgtgagaacaagcacataggcccgcgaaacggtaagttctggactgacgaacgcattcaggaagtgaccgacgacgtcaccgttcggcggatgacgaaggcgcagatcatggagaagcacaacatcactgaaagcggtttttacaacgcctgctaccgttttgggatcccgacaacaaaatgaaaaagcataccgttattcatatcgacacggctgaatttcataatgccgtctacatccttggtcgtgaagagaagatctataactggaaccagaacgtcgagttccgcaagcgccttgttggcttactgggggagattgcagcagcgaagcacctgaacaacattcacggccgccaccggatcatcattccgatgggagtcaacgcgcgcaccggcgtatcggttaatgcgttcggccagggtgacatcatgaccatctcacgcacagggaagcgcgaacggcaaacgcacgtctatgaggtgaaatcaaccgagggcatcggaaagcagttgccaaccatccggcaggacaacgctgaaagctacgtgatgaacggcgttgatgcaatcattctggtggcggtgcagatcaacaaggcgaaggcagagtgccggatcatgcagcaggtgtcgccggtggaggtgatcgagaagtggaggccgatggttaaccggtacggtcaggagtgttatgctttcaactaaatagactttgagattatcatggcccccgttaacactcacgggggcttttcttttgggcgacttcttccacggcatcaccgacatctatcggatgtataagaccgacttagattaccccatcgctgcggccgtcatggctacattgcgtcacatccagctcggtcatgaaaggcgacagatctggactaatgcgatcatggcggcaatgttcgcgaagggcatcacctttatcatcaacatcatcggagattccgttccgcgaatgcactggatcgcaaaccaggatgcaggctggatcgttgcctgcgtgcttgggtacgttgggatcgacaaggtcattcgcgtggttgagcggtatttcccgtccatgaatctcagggggaaaaaatgatcggcaaccttaaaatttacctgctggcggcacttgccgcctttttgctatggcagggaggcagctatgcactgagcaggtacggcgaaagccgttatgaaagcggcgttacagctgggattaacaaggaggctgaacgcaggaacaaaattgaccgtgatctggccgaaatgcgccagagggagaaagaccaagatgatcgcgacacgactcgccggattgaccaagcacgcgctgacgctgctagtgctgcttatgctgctgacaggctgcgccagcaactcaacgcagccactgccatcgcaaaacaacgcgcctccgctgtcggcgttagcagtgatgccggaacgctcgccgatctgctcgccgagctgttctatcagtcagtgcaagcgggtaacgaactggcagcagaagctgatcgatactacatcgccgggcagcgctgcaacacccagtacaaccgactattgcaagcaacaaggagtaacaaatgaggctgagtgacaacgggctgcaatttacagcagcatgggaggaattccgcagcgcgccttacttcgctaccgaagacgagcgccgtcgcgggatctacacctggggcttcgggcacactggccgcaaccctccacgcatcaacatcacgcgagaagccgcgctggcgatcctgcgtgaagacgtagcctatgctgagaagaaggtgaacgagtgggcacataagtccatcacgcaacccatcttcgacgcgctggttgatctggtcatcaatgccggtgaagagccaatcaagccggacaagaaggcgggagacttcgacgacctggtgacgcaaggtcgctgggatgagctgatcgtacagctggagttcttccgcaagcagaacgggaagatcgtcccagggctggttcgtcgggcactggcgcggcaggcgctggcgaaggggatgaactggcgggatgctgaggccgttggccggaacgcgaaggtgtaaaaaaaacagggggccatttggccccttgttatttattgcagcaaaaagaaacttaacatcacatacccaggcgcatattctccgacgtcgcagcagtgcgtgatcctggcgtcaaccactcttccggtgtaaccatctttctcagtccattcgcggaggttgagcgtatcgcctacagcaaagtgacgatcagcattgcgtaattccgcgcgcttcttcccgcacttaacagcgtggaagtgaaccgggaggattttaagatcgtggatcacttcatccctcccacgacctcagcgccgatagccgcgtacccagcgaggtcttcgaacgagtcggtgttgtcgtcagtctgagcgcggcagatctttaaaatggattgtagcgtcaccacgtccaggccagtcagcggcatgttctggcggttcgcagacgaacgcacgatattgaatgcgtcagctacgcggtcgaactggcgctctttgccgttctccgcgccgtagcggcgaccgcgctcctcaaggtggccctttaccttctcaagaacatgggcggcgtcaagaggctcagatgagcttttatgggcatcggccttttcggcgaccatgtagatcgcggttccatccgtgcgagcacaatcgcggttcagtgtcgcgatgttgtcgagagtcagcgccgactcatcagctacgccgtggtgatggaagaaattggacgggaactcgatcacgttagggactgagtattcaccgtgttccaccaggcaatgccagcgggcgatgatggtttcctgtccggcaagctcaccgtagccgatgaacgtcaccagcgagttgcggcccggaatgttgctgccgcgcagaggctcgttgccttcatccacttcgtaccagaagcgcaggatgtcaccagcagtgaagcggtcggtaacgtcagttgtttttttcttcttggtggtcatgttcatttcctcagcattgcattagtgttttgcgccagtcggcgctttcaagatcgacgtagcctagcagaacaggcaccccttctgaactccaaaattcagaacggtaattcacgaacggctctatgtcgtaggcatatagcgcgccatccatatccaccgccacccaattcgcccagcgcggcacggttatgaccatgccgttatagttgaataccttaaacagcccgttagtgatcagcttcataatcatccccaaagcacggaacgcgcgggtaggtcacgggtgcataggcctcgatcctgaaatcgcggttacggtcgagcggctggtagaatgaactgaactccgggtgaatgccttcctggcaccagccgacgaagaagaacggttcgccgccttcatcggtgcggccgtcccagcacgccagctgttcatcggtgtacccgcattcgtcgaaattaacgtaccagaagcggcggatcaggcggcagttgttacgcagacgcaccaccacccaaaactccatttcatgcccgtgctcaatgtccggggtgtcgcccaaagaccagactgacggcaagaattgttcgaatactggctctttctgtttcatttgcaaaaatcctctacgttgatgaagtcgggggtcataaccatgtttcccgcccgtaggaagctcaggccgaagcggtggatcagcgtgctgcactggtcgatgtcgctgtagtgcatgcgacgccagaatcctttcagtgtcccgacgtcgtcccagcgcacttgcgggcggtcgatgaactcagcgcggacgaaccggccatagtgccaaacccattgccctggcttcacgtcggcgacttccacgagcttagtggggaataccgggatcttgctcatcgtgctttcacctcgccgtagtagccaacgtccatcaggtctgatacgaccgcgatgacctgagccttcgcctcatcatctgccttgttgttggcaatggccttcatcactgcgctgcgagtggcgtcgaacatcggttcggacacgttacccttacggtagcgctcacccagcttgcaggcgtccttcatgaccttatccatctgcgcgttatcaggcaggcggtcgtatacacccaggtcgcgctggatattgatgttcttgatgcctacagcgcagctaacggcgctggcgtccccgacgtatgagcagcccagcacggcggctgcggcgatggcgatggcggtaatgcgtttcatcggttactccttgtttccacggatggcggcgatggtttcaatgtggcggcgctcttctatgcggcggcgctcttcttcggcggcgatgttgcgcatcaccagcaggaacaggatcgccagcagcggagatatcagcagcgcaagcagcgcccaacccagtccattacgtccacgacggtcagcagcgatgcctaccagtaaagccagaacaccccaaataattaataagctcatgattatctctcctgttagtcccggcaccctgccgggatctgcatattagtacggaataataacccgtgtcaacactatagaattattccagcgccgtgcgtgtaaacggtggcgatcgtcagcagctcaaggcgtagtgacttcaacgcaccggcagcggtctttgcgtcgatctcggtgacgtggttcttcgagtcggtgtaagacgctttaaagcggttgtgaccgtaggcgatgcagcgcacgcgcccgaactcgacgacgacgcggtagcttttgatcttcgtcagctcgttgacggcttccagtacagcgaactgcgcgccgggcatgagcatggcgcagatatgagcaccaagctcgcgggcttcgtcgcggctggtgatcttcttcagctggtcaatcatttcgggcctcctcgcggcctgcgggcgtgatctcgcacgccccggtagttatgttccattttgccagcccgcggctgacaagtccgttcagcgcagtgacggtatgtgacttgctgtcatagacccagtcacctgcgcgccattctgagacagcaagccgctttaatacggcccgctgcctgatacgcagcttcactccgggcgacccccggcagccaaccaagcagcgtaagcgatagatcgcgtcagatcgcacttcatggtgatcttgcggtcttcatcagcgttgacccactgcgagaacgtcagattcagaggcataggctcaccctcagcggctgcgagcgcatggtgatagctgttcagcgacagcagcagggagactcgctgccgggcagtcatttcacgcatgatcgcccgcacgcacatggaggcgctccccgccccttcatgcttgcgctgtcggccatcccaaaactggaatttcatcgacagcggtggtcttttacgtccgtccataatttcctcctgttatgatatatattctacggtttcaggaatgatcgccgcgtatttgcagcgttttagcgctggtatatggtcaacaatatttatcagaaaggcagttcgctatcgatccccgtcacccgtgggcgggccatcatctcaaggtattccttttgggcctgctcctgcgccagttttgcgagacggcgaacgctaaccatcatcttgacgatgaagcgggccgggtaacggtcgagggcaagcagatcctggcgaacgcggtcaacggcacgctgtacgccgatgtgcatcaggtagccgttgtgagagtagtggcgggaacactgaacagcgcggtcaatgatggcgtttacttccagcgcttcggcgtgtgcttcctggcgggctgcgtaggcgcgctggccttcaacggcgtccagcagtttagccagcagcgctttcacgtcgcacagactggcgttagctttccactctgcctggttccagtcgtcgaggttagcggagatgtaaccttctacagcctgctgcatatcgtcgtacatcgtatcgtcaagggtgtcgacgttttcgcagatcagcgcgttcgctgcggagtcgatgatcaggcaggccagcaggtcggcattcttgaactgtccacgggcttgctcgttggtcatccagcttgccggattgccgatggtcagatccagcgcggcgagaatttcgttagcggcggtaagatatttgatagctgacttagacattttgcgaccccttgtgatttatcggttagttactgcctgttcgataaatatattataggggccgcatcatgtcaatagtgcttacactactccttaatgaattctttgaaatctgcggacgatgtctcgcgccaggtcatcagcctgccgttaatgatcgcgtgacgttcgcagttgtaatcgtccctgaatttcagaatggtcatggtgttcaggccggtcttggtggtcagcttgcgcatgctgcccgctttagcgagaagtgcggggatgcttgtaacgtggcaaatcaggctcatgttgttttccttagtggttatcacggcagctacccataagcgggggaacggcatctttgatcgtgtagtaagggttccgggcttcgtgtgggttagactctttgctcaggtgtcccagctcagccattttgtaaattgcgtcgcgcactgactcccgggaatacggcgtcccgtcagccttaaacaccgtggagctgatacggtgcaggatctccttgtatggcgcggttccgtgcggctccgccctcagcagagaatacacggcttcctgcaatggcgtgtacacgtgcgcctggcgcttctcatccggctcaaagtgctcctcatccgttccggcgtccatatcgtaaacgcggtcttcgaacagccagaccttcgtcgcgtcgtcgatgtagatgaagtccggccgatcgacctcctgccctggggcaagtttcttctcatacgtgcttttcttcttcgcctcaacgtccttcgtgaacaccggcacctgaaagcctttgagcttaaagcgccccttcaaaccaccctggcggctcttaccgacgttcaggacagtgtagcctgtctccttctggcgggcgttcaatccctttccggtctgtgtcttctcgcgcaccaggctgaacgttttatacaccgcgcccttcgctgcggatccgccacgagactcaagatcatactggccggacatcaggcttcccttgctgacatgcgggatgaagatcccggcgcagttgagggactcagcgaaccggtgcccggcagtggtgatcagctgctggtcggtgttgctgttttcgtccatgctcacgccgttattgttggccgccgccaggtggaacattttgctgtcgaagatgaccagattcaccggcctgccgttggcgaactgcaacacgcgactcttctggatgcgcaactttcctggctccatcaggtcggcaggacgcttgaacaccttgatccagtcacggagattgacgccggtgcgcagcgaccaggcggccacctgcaactcaacgctgtccgggtcttcggtgaagaacacgctgacgccggggttacacacgcggaagcagttgaacagcgggcgacccatggcgaggctgaccgccatttgcaccagcagcgtcgttttccctgcacctgcatcgccgttgatctcgttgatggtgcggcggttcagcagaccttcgatcaccgggtcgtagaagtccggcgaggtgttcagcacgtattcgccagggtcgtaatctttcagcgcgggatcttcgaccaacccctgctcaacctcttcggcgagacgcttcgccacctcaacgcgctgggcggataagtccatcccgagattctgcttttcattctcctcgcgaacgatgcgttgcagctcaaggtggcgctgaccggcgtctttcttcttctgcttaggtggttcaggtggaacaggtggcgatacttcttccgcctgttcacgctcctccacctcagcacgcgctacctggtcgaagtaagcctgcatgtcggccatttcctgcgaataggcttcgtcctcttcctcgcgggtcattggctggttgagaatgtccgccgcttcgtgctgtttctcctgatcgcccagtaacgccttccagtcgtcgggcgtcatcggccttttgttctcttcgttcatcgtttcctcctgctttggttcggacattattcacggcaggtaataccgtgtcaatatcaattactttccgcctgaaaaacaggctaaaacatgtaaaccaatactatttatagactgtaaatacccgctattgggattttcatcacgcctttagttttcaatggcttacagagtacgttttttgagcagctgtaaaccaagtcgattcaagcggagctaccagccacctcaacgccacctgaacatcaggctggcttcgcaagttattgataacaaaggactacctgaaattttcaggaggaaaagggtcatactaccgaacttttaagtgtctgatattgaagggttaatttcaggtgttaggtggtatccctattatatataaaacccatataattacagaaacacgtacacccttacgcac

SEQ ID NO: 73 - DNA, 48007 bp, unidentified
  source 1..48007: mol_type = genomic DNA
atgggggaagaaaaaagcgctacgcagtggctgcgcgtttttattctccccaccatgccgtataggggtaaactggggcagagccacttgaaagaggaaaacaacatgactgacaaggtgaaggtgacgacaccgcggaacccagtcggcagaccaaccagctacaccgaggacatgccggaaaaactccttgaatatttccgtgtcgacgttgatgactatatccagcactcacacacgacagccgggaaaagcaacattcgcattaacccgaagaacatgccgtccattctcaacttctgcgagagcatcggcatcacgacgacgacgtttcatgactggcgttcgaagcataaggaatttgctgtcgcttacacgcaggcgcgcgagctttacgagcagatgattctgaatattggcttcgccacgaacagcactttcgcgaccttcatgctgaaagcgaacttcggctaccgcgacaacactgagatcgtcgtgaccggtgacgccaacaagccggtgcggttgaagatcgtcagcgagcggccgaaggaggagaagccgcgcgaggagtccgaggccgtcgactggggtgacgactaaatactgcttgacatatctatgactgcgcaggaatataggggccgggcaatcctgcccctactgaacaggacatcaaaatgactgaatcactgaaattcacctccccggcaccggcaccagttagcggcgttctcgcttgcgcttccagcgaggcaggtgcagaaaataacctcaagctggcgcgcgccatcgtcgtcgaggtcgcagaccgtggtgctgatcagcacgtgaaaatcaaagtaggcaccctgcttgccctggcgctgggcattgagggcgtcgcatcgcttgaggctgatcgcgacagcaagaacaaggcgctcagcgagtgggaagtgttcggcgtcgaaatgcttgagcagaagttcaagtgcctgccggtggtcaacatgaagccggaagagaagcgtaagcgcattgccgctggtatcgacacgctaacgcagcgactcgacgagcgcagcgaagacctggctttagtagatggacagctgaatgaatggcgcacgcacacccggcacatcctggatacctacttcgccacctaccccaccagcaactccaacgaccggaatcttcgcctaatcatgacggcggctatcgaaagcgcacacaacaaaaacaagcagctgaacaaggactataacgccatgcacaacagagcctacgcatcagaccagctgagggaggccgcagagcgggagcgggacgacgtgatcaacctcaaccgcaacgcagcggaggagatcgcccacctgcaaaagcgcaacgagcacctcgatcagactgtcgtcgacctggtgcgccagcgcgataagaacggccagcaggctaaccagctggctaacgaactggtcgataaacgcaaggagatcagcaagctgttagaaatcattgaccgtctgcacgcagagattgcagagaagcgcgacatcatcggcgcagcaacgcaacgctgcactgcgctcaccaatgacgcgaaggcgatgagcaagcagaacagcgacctcgcacacgcctggctaacgctggtctggagatcggcagctataagcagctcgtggaagacctgaaagcaggcaccgcctttgaccgtggcaccgtgaagcgccaggaggaaaccattgatcgcctgtatggtcagctcaatgagtggcacgactgggctacagacgtcatttgtagcccgtcatcactgggcggcgaggcgcagcgtacagccatcaccgcagcgatgcgcaagcgcaaggagcgcattgagtcactggagcagatcgtgaaggatgtcgttgcacagcgtgacgcgtgggttatttgggcgcgcgggtacaccaacgcaccggcaggcattcacagcactgaacaacttctttcgatggtgaaggcaaaggtgaaggcgaccgcagagggcatcgacgggccagcggagcacaccatgtgcggcacgctgaaagtcacccagctgaaaggggatgtcgttgccagcaatggaagctgggccatgctcaaacacggcaacgcggtgatcgccggaaacattcccgccagcaagctgaccctgggcgaggagatgaaagaggccattcgcgaagtcgtccgggaggagatgagcaacgcgttaaagcaagccatcaagaacgaacttgataagctgaccatgtaacccatcaaaatcattaaccagcggcccacggcgggccgcaatgaggtgaatcaatgcagaccttctacccagtctttagcgccattctgtgcatgttttgctttctctgctgcaaagggtgggcgacggccatggatatcggagccgggaaagacaagcgcatgatcaggatggctcgcaccttcgacatcgctggcgacgtgttccgctgggcgtgctggatgttcatcgtcgcgggcgtccttcgcaccctcggattgttctgattgcttacactttgtaccatttgcccggttgatcaccgaagtggctgactgataggctttaatgagactcgcagcgaggtggaaatgatggggatcgtaatgggtgtgtggttggcgctggtgacagctatcgcaatgatcgcaattcacatggccgcaatggacagggagcggctcaaggccaacccggtcagccagatcaccaagctggtgctcgcggtcttcctcctggtcggcgtagcgcacatagccaccaggtacacagctttcctccgcgtgctatcctgacctgacaactgctatcatggccccgttaacaaaacggggcttttttatgtctatccaatctgacgccagtcaattcattgacctgacactcacaccaccgcagaacgactttctgcaactgtcgtgcaaacacccggccttcgtggcgggcttcggtacaggcaagagtcagaccatggccgtgtcgtccgtgcttgacgccgcagagggtggcgcagatgccacgatcgccatccttgagccaacgttcgacctgtgcaagctgatcgccgtgccgcgtatcgaacagatcctatccgagctgggcattcgctttaagaccgtcggcaacaaggagatctacacctcccacggcgggatcggcgacttcctctttcgctccatggacaacccgactcgcctggtcggctgggaggcgttccgcgtccactgcgatgagatcgacaccctcaagaaagaggcggccaaaggggtctggcgcgcagccattgcccgctgccgtcagtcaccgaaggagtatgagccgttcgacttccttccgtccgaccgcccgctgaacagggttagcgcctactgcacgcccgaggggttcaacttcctgtatggccgctgggcgaaggacaaggagcgcagccgaaaggccggttatctcatgatccaggccgccacctcatccaacccattcctgcctgccgactacctggacgccctgcgcgccagctacgacccacagcgcttcgaggcctacgcgaaggggcaattcgtcaacctgaaatcgggcacggtctataagaactttaagcgcgagctgaatgacaccgacgtggagatcatcccgggcgagacgctgatcgtcggccaggacttcaacgttaacaagatggcgaccgtcgtctacgtcgagcgctatggcgaggatggccttgccgaactgcacgcagtggatgagcgtcacaacggcatcgacacaccggacgtcatccgctggctggtcgagaagtaccagaactcgggaaatggctacatccacccgatcgaggtctacccggatgcgtcaggcggcaacaccagcagcaagaacgccagcatgtcagacctgtcgatgctcatgagcgcagggttcgacgtctactgtgggcaggccaaccctgccgtgaaggacagggtgatcagcgcgaacaccctgttctgcaacgccagcggccgccgtcggctattcgtgagcagcaagcggtgcccgcaattcgtcgagtgtctggagcagcagatctacgatgacaagggtaagcctgacaaggaggccgggaaggatcacatgaacgacgcaggcacctacccggtggtctataagttccctgtcgtgcataatggcacgatctcagcaaataatattgaatgggtacgatgatatgacgatcacgacactgccgcaggcggggacggtatccaccgaacacccgctttacaagcggtttaaccaggaataccgcactatcgaggactgcgttgcaggacagacggtcatcaagcgtgccggtgttctgtacctgccgaagcccgaagcgtggacaatgaagcgttacaacgcgtacaagcgccgcgcccacttcctcaacgccacctatcgcacgcagatgggcatggtcggcatcgcgttcgccaaaccggccacctacaccttgccgacggccatcggctacctgtcgaccgacatcgacggcgaagggctggacatggatcagctcgttcgaatgtgcgtagcgcagaacatcaccttcgggcgcggtgggctgctggttgactatgacgccccggaggacgtcgggcaggtgacgacactggtcaacagtggccgcgcaactatccgcatgttcgaccaccggcagatcatcaactggcgcaagagcggcggcaaatattcgctcatcgtgctgcgctacctggacgacgtcgactatgacggcttcgagcactatcaggtggttcgctaccttgaactgcggctggtggatggcaaggcatattcccgcctgtggacggacgaactacagggtgccgccgggctgccttcctcggtcattcagcagaacgggaacatgaaccaggagcggccagaactgcgcccgatcatggcccgcggaaagcagctcgactatctgcctttctgctggttcggtagcgagaagaacgacagcgacattgacccggctccgctgtccgacatcgcgaacaccaatatcgcccactacaacgccgacgccgacaacaccgacagctcgttcatctgcggccagccgaccttcgtgatcgccggtgtaccgcagaactttcagaaggacaatccgagcattaaggtcggcggtgacgaagcgatcattctgcaatccatgggcaccggcacgcctaccgccagtatggtcgttgcaccaccgaacaccccggccgccgcgctgctggagaagcgtgagaagcagcttgccatgctgggcgcgaagctggttgagcgcaacggggcaacgaagaccgccacccaggctggcgcggatgagaaaaccgacaactcgatcctgtcccagtgcgtcggcaacgttgaggcggcgttcaatcaggcaatggagatggtgaaggacttcaccggcaccgaaggagcgaacgtccatatcaacaagcgatacgaagatatcgtgctgaacccgacagaactgacagcctacatggcggcggtgcagtcagggatgatgcgtatgatcgacttcctcgcgtggcagcagcgcatcggcctgatcccgaacgacgcagatctggaagacgttgaacaggagctgaaagacggtgccgaagaaacgcagctgatcttcaacgcggctgctcgccagacccagcaggggctggacaacccgcaggaagataaagacccggaggaagacaagccgatctctaagaagaaggccagcgcgccgaagaagggggctaaatgacatccgttaactcgcggatggcgtcggaggcggtaaggcaccgcctctacctctaccgctacagcgaaggacaggcgaagaagatgacccagctactgcgccgaatgtccgtggacgtggtcggccgcctgctgtacgcgctggacgactcaaagatctccgccgacaactacacggtgaagcgtcttgaggccatcaaagcagccattaacccgacgatcaaccgcatctacaaaaccacctacggccagctcaaagccgaccttgaggcgctgagtaacggcgagctggcgtaccagtaccgcacgtggcgaacgctcatccctaacccggtgctggacttcgtgggcgggctggtggagatcccggagactcaggtatgggcagcggcgaacagtcgcccgttccagggcatgcttcttcgtgacatcccgtcagtgctgggcgatgccatgaccgactcgatcggtcgggcggtgcagcagggaatcctacagggcgagacgtatgaccagatcattcgccgggtcaaaggcagtgcagcagcggcctacaaagacggggtgatcggcaccaacgagcgccaccttgccaccgtcacccgcagtgcagtgtcgcacgtcgcagctgaggcgcgggacaagatcggcgaggcgaacgccccgctcatcaagtcagaacagtggctgtctacgctggacaataagacgtcgaagctgtgcatcatccgcgatcagctgctgtacatgcgggacaagaagcacacgccgatcggccatagcgtgccctacggcgctggccccgggcggctgcacatgaactgccgcagtacatcgaccttcgtgttcaagagctgggaggaattgggcgttccgggagtcaagatcaagggcgcgtcgcgcgccagcatgaacggacaggtgccgatttacatggactattcgagctgggtggagcgccagcctatgagcacgttaacgcaggtgttcggcgtggagcgggcgcagctcatccgcgacggcaagatctcaccgcctgacctgttcaacgacaagggggagtatttaacactctcccagcttcgcgaccttgaccgtatcccggcagaagactaacatcgtgccgttgacaacacaggagctatcacatgtggaaatacctgattaacaaagaagcattcgacgccctcacccctgaacagcaggctgcatacaaggcagtcggtgattctggcaactatgtgatgaacatcgaaggcatgcctgacgtgcaggccatgcagcagcagatggccgatcttcaaacccgcctgggcaccatcgacgcagagaaggccgcagaagcagagaaggcccgacaggcagcgcttgacctggcgaagaagaacggcgactttaagaccatcgaagaggactataagcgccagatcgccgacctgaacggcaagatcgagggcttcggcaagcagcgccgcgaagacttcctgaacgcgcagatcgataagctggccgcagagctgggtggcaaggagtatgccgcgctgttcaaaccggcgttgcagcagcgcctgtctgtcgagggtggtgaagatggctccgacttcatccctcgcgtgctgaaagacggcaagccgtcggcgatgtcactgaacgacctgatcggcgagttccgggcagacccgacttacaaaccggtgtgcgtagcgcctgcatcctctggcaccggccgccatcaggcaccgaccccgacgccttctgcttccgacaagctcccgagttttgaagatgtgcgcggtaagcagctgagccgcgcagaacagatcgcggcaagcatcagcgacgcagagtaagtaagcacaggcccggcaatgccgggctttttcttgcttgtccagtagttgccggttatcatccagacgtttaatcactcaaaggacatcgcgcgatgagctttactatcttccaacgaaaactgatcggtacgaccgttcagcttctgactgaaaacctgaacgtgttcaacgcggcttccggtggcaccatgcttatcggcagcggcgaggttatcaaggaaaccatggagaaaatgaccattgggatcattgacggcctggtgcaggatcgcaacgaacacgccccagttaacactgtggttcagccgaaggtgctttcccgcatcctgggcggttccatcaactccgctggccgccttgggccggtagccatcacctccggccagctgcgactgatcgagactgacgtgaaccgcgcggcagccgagatcgcaaccctcgcgtcggaagccatgctgaaacgctacgtgaccgtggcaatgggtgctggcgtggctgcgatcgaagcgttcggtcagggtatttatacccaggacgcttacatgaccagcaaggccggtgaactgtatccgaccgtcgaagacttcccgctggcggcgtccatcttcggcgaccaggccgacctgattcgcacctggttcatgtccggcacccagtgggcgaagttctccgcccgtgaagcggtcaagtccgccaagctggtgtttgagctgggcaacatgaagatcttcaccgatggcttcggtcgttcgttcgtggtatccgacgcggcaagcgctggcatctccgcggcgacctccggcggctccgcgatctacgcacctgatcatgcaattgttggtctggccgccaacgccatccaggtaacgaccaccggcctcaaaatggctgctgacccggccaagctgggcggcgagaacattgaaagctggtggcagggtgagtttaactacagcattgctctcaaaggcatgcgtcctaccatggcgttccgcaccgccaccgaaggcaagaaaactccgaccatggccgacctggtcaagaaagagaactgggaagccgagaagggcgaaaccgaccgcaagccggttggcaacgacgccgatccggtggtgccgactcgcaacgtgcgcgagacgctggggatcattatgaagctgaccccaactaccatcccggtagcagaagctggtaattaagcgaagaagtgaatagcatgggggccgattggcccccttttcattggagcaaaatatgatcggcaatctggacgacctgaaagcattcgcggcggccaacggctacacgggaatgactgacgaggagctgagcaccgcgctccgccaggctaacctgtggctgtggtcactgtcatggaagggagagcaggctgaacccggacaggcggacatttggccgcgcactatctgcgacgactacaactgtctcgactacgacaccccgccggaagtcctccgctttacttacaccatcgtatgcgacgccgtcgactctggcacggagttcaacaccgcatcggctggcgcgtataagaaacgcacccggatcgagggcgcgatcgatgtcgagtacagcgagcagagcctatacagcgcaggcttcgaggcaccctacatgatgggcatgatcgggcactggctggaaggcaacgggcgcggatgtaacgtcaagatggagcgcggataatgaacaagctatatcgtgaactgcgggcagaggcccgcaagctgttcaaagagtacggcgcagtcatcaccatcagcactccgggcggcatcagccgcgacccagtcaccggcgaggaagtggtgacgccaccgggcgcggtatgcaaggtgctgggcgtgatcaccggcgtcgacctcaagttttgggggctggcgaccatcccgccgggcgagcagcagatcgtcatggcatggacggacaccaccgggaaggagtgggagccgaagatgaatatgaccgtctcaggtggcggccgcgcttactccatcaccgagattaagccggttatccccgacggtggctacggcatcgtgtacaaactgaggatcaaggggctgtaatggcacgcaagcggaacggaacaatctttgccaacaatgtcgctcagtgggctggcggcgtcgtcgagcgtcacgaagagatcgtgcagctggcggcgatgaaggtcttcgcaatgatcatccagcgctcgcccgtcggcaaccctgacctgtggaaccgcaaccagcaggccgtcaaggagcgcaaccgcatgagcgacctacgaacggccatgcgcgaaagcgacactttcggctacacgaccaagcgcggcacccgccgcctcaagccgggcgcgaacatcgttgcagcgccggcgaaattctcttcccctgtcgggccagtcggcccgcgaatcccccgacttctcaagaatgagcagggcgtcaacccggtcgggaagggctacgtcggcggccggttccgggctaactggcaggtggggatcgactttgtccctattgagtggctggatgaacgggacaagtcaggcaccccgaccatcaacaaaatggtgaacgccgtcgagcgcttccgcgtcgggatggctgagcatatttatttcgttaacaattcgccgtatggctacccgctggaatatgaggggcactcacgacaggctcccgcagggatggtaaggatctcatgtatccaatttgaggaagcattcgcggcagcaacagcagaggcacaaaaattatgatcagcacttcacagattcaggcgaaattcgacctaatcgcaatgcagtggggtaacaacaacaatatcgccctcgtgtggcgtaacagcgccgataacgacatgaacgagcaggcggtgagtcagctggtcggcttcccgcagcacatccctgcaccgtctatctccatgggcttccagcagtcagacatcgcgaagcgcgggatctatcaggtgatgctgcgtgctccgcgcctgtccggcacccggcagatctacgatgcagccgatgcgctggtggaggcgttcaatgaagcgatgttctatgacggtaattatgttagcatcggcgacgacgatcagcagctatacattacggcaccggctgaaatcggcgctgactatgaagacgacgccgggctgcatgtggctgtcacgatgaactaccgtatcaataacgcaagaggctaacatggctacgaaactctcatacaacatcccgaacggctcaacgctgcaaatcgctcagacgatgggtgcaagccttgccgtgtcgggtatctccaacgcgaaagaggcagtagccaccctgtcggctgctgattccagtatcgccgctggcgactacgttcagctgtttaccagctgggtcaatatgaatggcctggtctgccgcgtgaagtccatcaccaccgacaaggtgacactggagaaggtcgacacctcagacaccgaaatctacccggaaggcggcggagctggcaccctggtcaagattcaggcgtggatcgacctgccgttgaccccgactatcgccaactccggcaacgagcagcagaccaccacgttccaggctatccagcacgaacgcgcggtgaacatcaacacttacaagtcggcggcaacgcagaccttcaccatggcgcacgacgccagcgcgccagtgcgtgaagtgttgaagcagctggatcgctcgcaggacgtgacggcgttcaagttctacaacaagcgcgcgaaagaaacgcgcgtttatggctgccaggtatccttcaacgagatcccggcatcagaagtgaacaacgtcgagacgaacagcctcgttctgagcctggtcagtgagatggtgatctatcctgccgcgtaaagcgtgctatcatcagggcggcttaggccgcctttttcatatctggagacaagacaatggctgcaaaattcaagttagtacccgctggcacgttcgaacttccgatcctgatcaccaccgtagggcaggatgagcctacagagctgaaattcacgttcaagcgcatgcccctgaccgagctgaaagagaagcaggaagcgatggcgaagcgcgtgcaggagatggatgaggaatacaagggcaaaaagctgtcagtggtcgaagatagcgtgctgcaatatcctttgatggccgattttgtgctggacatcgcaaccggctgggagctgtctgacgagttcacgaaagagaacctgatcaccctgttcgataactacccgacggcgtttatgtcgatcagcgttggctaccagtccgagctgtggaagctgcgccaaaagcactaaccgccgcgattgagggtctgtatttccccgatccgccgcagcagctggtcgataatttcgggggggagctggaagactaccgtccagaagtggagctatcagcagagattgttgatagcttttatttttaccagcgtattgatacccaatggcgcacggggccgggcggtttaatcggcctcgactacaacgtgatccccgtcatggctgacctgtatggcgtcaagttcgatcgcctgctcatggatgacctggcaatcatggagggggccgcgatcagagttctcatgagcaggagtgatacagcatgagtgaaaacacagaacgcttgatcgtcgacgtcgacgccagcggggtcaacgcgggggccaaatccctcgcagaccttgttgacgcggcgcaggacgcaggcagggcagcggacgggctgggcgacaagttcgaccaggtgaagccgtcagccgactcagcagccgcagcggtcgacaacttcaacaacgaggcgaagcagacgcaggatgctgctggcgacgctgccgtggggctgtaccggcagaatcaggagcttcaaaacctgctcgaccgcatcaggccaacgcgcgttcagcttcgtgacctggcgcagcagcaggaggcactggcgaaggcgcaggctaacgggctgctgggcgcgaaggaagcggaggagtacaacgctatcctagccaaccgtgccgggatcatcgaccgcaacgacgcggctatgcgcggcctgaatgtgacgtctgagaagcagaagacgctacagcagggattaaccatcactaccggccaataccgcgctgctatgggtatgttaccggcgcagatgaccgatatcgtcacccagctggcaggtggtcagaatccattcctgatcatgatccagcagggcgggcagattaaagactcgttcggcgggctgggtaacaccttccaggcgcttaaacaattcatttccccttccttcctcgggctggctggcgcgacagcggccatcgctgcaatgggttatgcagcctacaccagcgcagaccaagccgatcgactcgctgcatcggtgacactcatgggtggggcaggctttaagtcagccgaagagctgaacagggccgccgtcatgatccagaagtcaactggcgacagcattagcagcatcaccgaccggctgatcgagctgaacaacaagggcacgatgacagccgacatgatggagaaggtggcgatctcaacgtcgaagctgtcagatgccgggctggacgctggcgacgtcatgaaagacttcgataatctggtgaagaacccgatcaagtctatcgccgcgctcaatgagcagtatggcttcatgaccgaagcgcagatgaagcacctaatccagacgcagaaggagaagggtgagcaggctgctgctgccgaagcgctggacatctacacaacggccatgaataagcgggccgatgacgtgatcgagaagactgataacgtcggtcaggcatggaagacgctgaaaaccgccgcgtcggatgtctttaacgatatggggatcgtgctgcgctcgtgggggaaccgcgccgtcgatattttcaagatggtcaagctatcgatcgacgacctgctgaactatctcgcgcagatggacagtaaattcacgctgggcgttgctgacctgctggacaaggtgccgggcgttgacggccgtggcgttctccgggcgatggggatcgacgtcgaaaccgtcgagaagaatggccgggagtccatcgagaagggcaagcagatcgcaaaggagttcgcggaggtcagcaagcgggcctttgagagccaggcagacgctgaggcgcgggcgcgcaacgccaacggtgctaccggcagcggtgctaccgatgagaagagcagggaagcggtcagcaagctggcgaatgagtcaacgaagcacaacaaggagaaggccgtcaccgttgcgcagggtgatcgcatccttgagcagtatcaggcgcaggagctggcattacgggcgcagatcaagacgctgaaagaccgtaacgccttcgacgtcaacgcctccgagcagatgaagaactatcagctgttagtcgcgaagatctccatccttgagggcatccgggctgacgccaaaggccgggcactcaccaaggacgaacagtcgcttctggcgagcaaagaggaaatccttgcaaaagccaagaccgtcggactgctgggcgatcaggtcaagcagcttgaacgtcaggcgcagatcaccgatgagctgacccgcagcggcaatgacctgtctgttcaggtggcggccattaacgcctcatggggtctgtcagccgatgaagctgcgcggctgctggagaacatgcagcgagctgcggccctccgggacaaaggcgcgactcaggagcaaatagacgaggacgcacgccagcgtgaagcgctgcggcaggctaccgacgcgaaaacgcaggactgggcaggcggcgcacgctccgcgatcgaagcgtggggtaaggatgccaccaacacctcagccaacgtacagaaggccatcactggcgcaatggatgccggtctggactcgatcaactccttcgtgatgaccggtaaggcgtcgttcgcagactttaccaaatccatcctcgggatgatggttcagatgatcaacaaatggctcatgttcaaagccatccaggggatcggcggcgcgatgggcttcgatatgtccagcatcggattcaatgcgaagggtggcgtatacgatagcccgtcgctgtctgcttacagcaaccgcgtctacaccacgccgcagctgttcacgtatgacaagccgaagccgtttgcgaagggcggggtgttcgccgaagccgggccggaagccatcatgccactggcgaaggattccagcgggcgtcttggtgttcgtgctcagggcggcgctggtggcggcgtctccatcgggtcgatggaagtgaatgtcgaccagaacgggcaggcgacggccaacgtgtcagagtctggcaagctgggcagagcctacggtgatgcaatggccgcagccattcaggacggcatcgcccgggcaagctccccgggtggacagatctggatgcttattaacggtcacgcgtgataacctacagcctcccacacaggaggcttttttatggctacattagacgcgtggatctggccgctggcggcaggtcaacaggtatcagtgaaagaccgcagccggtcgaacagcttcggcgacggctcacagcagaacgttttagaaggcatcaatccgttcattatggaggtgccctgctcgtggactggcaacgccaagaccggcaaccagatcctatccttcctgaaagcgcacatcaccaacccgttccagatggttccgccgcatggcgaactaggcctttacaccgtgaaatcaggcacgatcaaatatgtcgcgctgggacgtgcaaccatgaacattaccttcacagccgagcaggccgtgggcatctacacaggggtgaaaggatgagcaacaccattttcgacgaagccacaaagctcgacccgtctggcaagatcattctcatggagatcgacggaaccgagttcggcgcggggatcatccggggccactattgccagctcccgcacacgagcaaggagatcctcgacagcgcgaacagcacactgacccgtgatcagctattcaagtgctatggcggacgcgggacggtgacaaagaacgaagaccgtaacaccatcaacttcaaatcgtcagcagctgacgcgaaccttctgctgccttcgttcaccggtggcctgactggtagcaaatatcaggtgatcgaggtggtggggcgctggatcactcctcctgccgggtcggataacctgtatacgatctattacaagacagcagcgcatgatttttcccccagctacaacaagggcggggctttggcgagcgtaaccgaagatcttggtgatggctggctgaaattctcgttcgacatgtcgaagctgagcgctggcggttcagactgggtaaacagccagattatcggcatccgcattgacctgtggcagcaggcagtcggcgagatcgagatcaagcgaatcagcatcctgaacaagaacccgcacgaggttgacgcatccaagctggccccgaaatcaatctggttcgacaacgtcgaatatggctattggccgtttatggctgaggggatcgagttcagcagcgagcagcaggggacgcctaccctgtccattggcaaccagtcgggggtcgtcagcgcctacctgcgcgcctatcagcagatggtcggggcaaaggtcaagatcatccagacctacgcgaagtttctcgatccgcgcaactttaccgatggaaacgagttcgccgactcaatgcagcagtggacgcagctttactacatcgatcggccagactatgagagcgaagagtatgtgcggttcgcgctgtcgtctccgctcgacttacagaactttcaggtgccaacgcgtcagatcacgacgttctgtcaatggcaggcccgcgggctttacggtaaaggcctggacgccggggaagaaaacgggtgcagctggaaccgtggcacagctaaaaagtggtacgacaagcgcgggaaccaggtggacgacatcacgaaggatgagtgcggtgggtgcattcaggattgccgcctacgcttcggccagctggtgagtgaccccaaagcggccgttctggactacggcggttttatctctgtgcgcctgattgattaaacgcgctgtatcgcgttctgcggcgttttcttgcgtaagacgtccgaacgtatggcctgacggcgttaaacgcgatagcgtgccgttcaggcccgcagttttcgactaccgaagataagaatacatcccatagccatatataataaaaaccctcccaagggagttttatttatatggtcttgggtatgtcttatatgtatttatggtaataaatatataaacccataccacctaacacctgaaattcagcattataaatcaatgatttaaaatttcaggtggtgccaagtggaggcaaaaatgattgacgtaaatgacatcccggaacagcaattaacctatattaaacaacaccttacagagtgttcgccgcaagagggctgcgggcttctggtgaattcaggcggaggcctcgaatactggcccgtcatcaactcagcagccgacaaaatgaacagcttccgcattgctccgcaggacttcgctgaggctgaggacgcaggcaatatcgttgccgtcatccattcacaccctggcgctgacggcctggcctacccgtccatcctcgatcgccagctcatgcaggaaacttgcttaccgtggttcatctacgccccggacaaggatgagctggcggtgttctttgaggagccgaaggggctgctgggtcgtgacttcgtgctgggtgcgaccgactgctacggcctggtgatggcgtggcaccgttcgcgaggcattcagctccctgacttccgcaagccgtacccgtggtgggagaagggtgaggagcttttcacggatgagaatttttcagcagcgggttttatcaagaaggccgaggcagagccgggcgacatggtggtgttccgtatcgcgtccagcgtaagcaatcactgcgggatctacaccggcgacgggatgattatgcaccacctcatgaaccgcaaatcgaccattgataggatgtatggcacctaccttgagccgcgcattactggtattctccgacatgagttactaccggagatcacaccatgggaaaccagctaagcaccatccgactatacggcgaaatgggggcgcgcttcgggcgcgtccatcaccttgcggtcgactcctgcgccgaagcaatcagcgccctttcagccatcctccccggattcgaccagtacatgcgagacagccagtcgcgcggcctgaccttcgcccctttcatcggaaagcggaacatcggcttcaatgagatgtcgcagccaatccctgacggcgaagaattccgcattgccccgatcatcatcggcaacaagaagggcggcctgttccagaccatcctgggcgctgcgatgattgtcgcgggcgtcgtggcgtcgttcatccccggcgggcaggctgtctccccttacctcgttgctgctggtatctccacggctgctggcggggttatgcagatgctttccccgcaggcgacaggcatgaagatccgggagaatgacgccaacgcgccgtcatacgccttcggccagccggttaacacgacagcacaaggcaacatcgttggcgttttgtatggcgagcgtgagatcgggggtgctatcatcagcgccggaattatcgctaacgaggtacgttcttaatggaaatcaaaggatacaagggcgggagtagcaacgtgcatacccccgttgaagatccagactccctgatcagcaacgcaacggtaaggatgctcctggcgttgtcagagggtgaaaccgtgccgattagcgcggaagacctgccgaagcgcgtttacatggacgggacgcccgttcagaacgatgacgggtcagtaaacattccgggcgttactctggaatatcgcaacggcaccccgcagcaggagccgatcaacggcttcccggcggtggaaagtgaaacacgaatcaatgtggagctgaaaaagtcttctgcatgggtgcgtaacatcaccaacaccgagatcgacgccgtccgcatccgaatgaatttccggctggtcatccagcagaaggacggggatcgcgtaggcggacgcattgagtaccggattgaataccgcaaagtcggcgacagcgcctacaccgtggccttcaatggtgctgtcgacggcaagcagaaagacaactatgaacgcgatcaccgcatcgacctgccgaagagcagcactggctggcaaatccgcgttacccgcctaactgacgacagcaagtctgataccactgtgctcaactccgggatcgtggctgtcaccgagatcgtcgacgcccgcgttcgttacccgtggacgtcccttctgttcgtcagcttcgacgccaaatcgttccagaacatcccgaaaatcagcatcaagatgggcggccgtctggtgctggttccgtccaactatgacccggttaaccacacctatagcgggtcgtggaacgggacatttaaacaggcgtggacggataacccggcgtggatcgtctacgacatcattctgcacaagcgcttcggtattggccgccgtatcccgtcctcattcctgaacaaatggacgatgtacagcatcgcacggcgctgcgatgagctggtgacgaacgccgacggcacgcagaaccgccgttacacctgtaacgtgtatatccagaaacgcgcgcatgcgtggagcgtcatccgtgacctggcgtcgatctttaacggaatggtcagctacagcaatatgcaattgcagtttgcgcaggatgcaccggcagaagtccgccatgttgtgacaaacgacgacgtcgtgaacgggacgttcgaatattcctacggcagcatggctaaccgccgcgggatcgcgatggtcacttttgacgacccgaaggcgcactataagacgcagaccactgtggcgcagatcaaagacctcgtggagcgttatggcgttgagccgctggaagtgtccggcatcggctgcacggacgaatacgaagcgcaacgtcgtggcctgtgggcgctgctgtcgaacaccaacgacatgcagatcagctaccgcgtcggcctgaacggcatcaagtacctgatcggcgacgtcgtcggcatcgctaaccgctacgtgcagggcggccagttcggcgggcgtgttgctggcgtatccggcaccaccatcaccaccgaccgcatgatctccgatcacgtggcaatcggcgacagagtgatcgttcgtcaagctggatcggatggaacctacaaccgcgtgatcaatgcaatcgcggctgaccggatgtccttcaccgtcgacggcactaaccttgatattcagagcggtgaagtgttcctgctggatactaaggtgctggcaccggaactaatccgcatcaccaagatcacctacaacgagcaggacaataatttcaccgttaccggtctgcaatacagccactcgaagtatttgcaggttgacaccggcgcgcgaattgaagaccgcccgacatcgctgatcccgaccggacaggtacaggcacccgctaacgtggtggccgaaggctacagtatcgttaaccagggtattcgctcagctaacgtaaactgttcatggttcaccgtagatcaggctgtcagctacgacattcaggtgcgccgaacctctcagtcaaacggccagtggtcacaggggtggactaaccttgccagccagtcgagcacgtccgttgacctgacaaacgttctgaccggcacctatcagttccgcgttcgttccgtatcccgtgacggcgggtcatctcagtgggtcgagtcgaatcaggtgttcgttgacggcaagcgcggcagcatcccggcagtagctggcctgaacggcgtaggcatcgttaacggtattacctggcgttgggtgactggcacggatgatctgatcgacatgaagtcgacagagctacagttccagcgcattgacggaaatggcgctccggttggtgggtggatcgatctcagcgtcgtgacctacccgacagggacgttcactcagtccggcctgaaatttgccgaacgcgtgcaggtgcgcgcccgctttgtgtcgtcatatagcgacgctggcgagtggagcgccccggtcatggcgatgacgtccgacaacatggacgactattaccagaacatcgacgacgcgatcaaaggctccgacaccttcggcgaacttaccagcggcataaaagacgtaagcgacagcgcacaggcagcgaaagacgccgcgcaggccgcgcaggttactgctgacggagcagtggcaaccaaccagcaacagcagcagcagctgaacaaccagctggccgagatccagaagaacgcgcaggccatcaccaccaccgctaacgcgggggcggcaaacgccagtgcaatcgctcaggagatccttgaccgcaaggctggcgacatcgcgaacgccaacaaggcagctcaggacgtggccgacgctatcgcgaaggctgagacggatgacgcagaagtggcagcccaggctgcggctaacctgctggcgacaaaaaacgaagtcgaagcgcagatcagcaccaccaataccacgatgcaggacggcttcgacagtctggctcagcagatggcatccatttccgctggcactggcgagcagttcgacagcctcgctatctggtacttcgacaatggcccggaagggtgggcttctgacgacgccaacaccaatctgctcccagtagaccaagatggctggatttacccagctggcgcagcatctaccatgcgctcaccgaacccgctggcaatcgacgcgcgcagctataagtacatgcgcctgcgcatgaagcgagtcgggaacccgtcatgggctggcaagctgtattggatcggtgttgatgagactggctggacaagtggccgctcgcttgctatcccggcacctgactttgacccgaccaccgggatcactgtcctgtcgctccctgatctcctgtgggcgacatccggcaccgttcgccgccttcgtctggacttctcaaccaaccaagacgccaataactactacgcgatcgactggatggcagtcggccgaccgaccccgggcgcgtctcaggcgcagattcaggatcttcgcaccgccatgaccgcggcggactctgccgaagccgcagcgcgtaacacgctggccgtacagctccgcgggaactatgatggaaccgacccgtccaagctggtaacaggtatcatcttcaacgagcgccagacccgagtcaccgcagagcaggcgatcgccagcgacgtcaacaccctgcgcactgactacaacgcgaacaaggcctccgtgacccagcgtctcgacacgctgaccagcgagaaccaatcgcaggcgcaggcgcttacccagcttcaaagcggcctgagcaccgcgaacgggaagatcacggcgaactccaacgcgatcaccagcctgcaatcgactgtcacccagcagggcagtacgctgacctctcagggccaggcgattacctcgctaaagaacaccgtcacggaaattaagatcggggcagagaacatcctgctggggtcagaccgcacactgaacccgctcaccatgcggtcttcggcgacgtcgttcacctcgtatgacttccaggtgccggacacgtggaaggcgaaaagcatcagtgcgaccacctatttcacgctgtccgtatggtttaagaagtccgacgggtacaccatgaaagatccgttcaccagcgccgtgcttggggccgcgagcgcgaccggtgacagctggagcaagcgcttctacatgagcgacggaagcatcgtggaggatggccagtatttccgctatcgcgggacggttacagtggcggccggggcggtactgttcaaaaatccgaacacgctgcgcattatctgtgaggataaggagcggacgaccggctgcgtgctgtacaaaatccagctggaagagggcaaccggggaaccgactgggggccgaacccggacgaagtccagggcggcatcaacaccgccaacgcgagcgctacggcgcttaacgccctgaccacccgcgttactgcggcggaaggcaccatcagcaccaacagccaggcgatcacccagctcaaaggcgacgtgagcactttgcagggtcagatggcgaccaaggccgaagcgagcgcattgcagcagctggctaccactgtcagccagcaggggaacaccatctcttcgcagggtaaggccatcaccgacttgcagaacactgcacagaacggtaaagagaaatactggctgaccaagatcttcgacattaaggttaataccggatacgtgccgaagttaacagatctcgcaggcgtgccgccgctggccgtgtacgagatggctgacgctgcaaagctggacttcctgacttatggcgactacaaaatcgcgtatgtgaaggcgctggtgtatgttgcggctgataagaccattgctatctctcccggttcccgcatcgttgacgataccggacggctgtatgtcaatggagtggaaacggcttccttctatgccagcaccaacacctacagcatggcgctcaaaaagggctggaacacgattgagttcgttgttgcgcagtacaccggtcagttctatatcaactttggcctcaagctgtccgacaacgtcgatcagctgttcagtggtgccggtcagctggccgctgcatccgcatcgcaggtgctctcctctcaggttgagcagacctccgggaaggttgacgcgaacagcgccgcgatcacttcgctgaacaactcggtgcgggacatcaacaccgcgctgaacaacaaggctgacgcgagcgcgttgcagtcgctgactacccgtgtcaccaccgcagaagggaagatcacggcgcagggtaacgccattacccagctcaccagcgacctgtcgacagcgaacgggaagatcactgccaactcaacggcgatcaataacctgacgacccgggtcagcgcagccgaagggaagattgactcacaggctgagtccatcacctcgatcaactcatcgatcaagggcgtactgacccaagcggccaaccttatcccgaacccgacggtagatcctgcctatccgcaaatgggcatgaccgttgtttccacaacgtcagaaggcgttccggctggatgcccttacccgtgggcgattaaatgccagtaccgcgatcacatcccgggtatggacaacatcccttgtcgcgaaggtcaggtgtttgagttctctgtactggccgcatgcggcaccggctccgcaccattccagcactacatcggcacgtcgacgctggtttctggcagcaccgggtcgccactagcgaacggaggccaaatctcagcggctaccggcgcacagtggacgcgcactacgtggcgctggacagtaaacgcggcgcagggggcgaagggttacttccgcccgttcctgcaaatcaaccagtcaggccctaacttcgggacagtatggtatgcaactgactggagcgttcgcgacgtcaccgcagcggcgaatgccgaaggcaaggccgatgccaacgccacggcgatcagccagctgacaacccgcgttacttctgcggaagggtcgatcacgtctcagggccaggccattaccaaactgaccagcgatctgagcacgctgaccggcatcgtgaacaataaggctgacgcttcggcgctgaatgcgctcactacccgcgtatcgactgccgaaggcaagatcgattcacagggccagtcgatcacccagctgagtaatagcctgtccgcaactgacgcctcaatcgacgcgcagggcaagatccccgggaacctgctggctaactcatcgtttgagcgcggcccggttaacttcaccggctggagcagccttgccaccatcatcacggcaacacagccgcattctggcaccaaaattgtcaagatggcggcaggcggaagtgctggaatcagtcaggccgtggagatcacgcagggccgccggtatcgcttcggcgtgtttgccaaacaggatgccgggactgtcatcaacagtcagagtaacacgaaattccgcattgctgacggttcagacaacctactggccgccgtcaattacgggccgttcactaacacatggcagcacgtcttcatggactggacggccacgaagactaccatcgcgctgttccagctgactacattgctgagcgctggcgcgatgtacttcgacgatgtatacgtggtcgacatcaccaacgacaccaagattcaggcgaacgctgacgcgatcacctcgctgaacacgaaagtgacccagcagggtaacgacatcacgtcgcagggtagcgcgatcacccagctgaccaaccgcgtgcgcactgagcagtacagcaacagcaacccgtgggtagatggatcgttcgagtcgtatgacaaccagcaagccatcggtggatctaatgccctagtcactactgacttctcattcagtggtcagaagtcgcttatgtgtcgccgtggcaacggtgaaaccggcaactctgacaagaatttcgggtatgaaacagctattcgcgagtctgcggtttaccgcttcgaatgctgggcgatgatgccagaagatgagacgccgccgaacgggtggaactgtattgtgggcttaatggttcacaacacagccaaccagaacgcatggcctagcgcattagtcatcacagaggcagggcttgctgctggtggcggccgcggtcagtgggtcaagttctccggtaagctcggcttagacggcacaaagaaaacacgaggtcgcctgtggatctccactcgcggcacgtccggcggccctggatatcgcatctatatcgacgatctggtgatcaccgacgttaccgatgcgcacgcagcacagaccaccgcagacgctaactcaagcgcgatcagcagcctgaccagccgtgtgagcaccgcagaagggcagatcacatctcaggcagacgcgatcaccaagctgagcggtgacgttagcaccatcaacggaacgctgagccagaaggctgacgcgacggcgctatctagtctgcaaaataccgtgacccaacagggcaaggatatttcggcatctaacagcagcatcgctaaccttcaggcgtcaatcaatcgccgcaccgtgttcaccgtgacctcaagaggcattggcccgagcgtgaaagaaggcgtgttcgatgagtcaggaaataaactggttagccctggtcgtagctacacgatgattacctttaaggtaaattctgataactcgacctctatcgacaccagcaagacgtatgacgtttttggttctgccaataacggcaaaacgatgtctgacgacattgcggcgctggctagtggaacttatgtttgtgtgctgacctacgatgagccggccggaaaccgtgcgtctattttatccgcaatggagcttttgggtggcacagcggaggtcttgaactctctgccttatcgcggcgcctatatcctgcttggtcgcaagggtatgaaagctggtgacggtctggaactgcgtgcgccaactggtggggacgcgaccgcttatatctcaacttccgttgagtttgtgaacgggataatgatgggcctgggcgctgctggtggtgtaatgatgaaagcggatgcgaacgcatcggctatctctacgctgcaaaacaccgttactcagcagggtaaagacatcacctccgcgagcagccagattactgcattgcagaacaacctgaacacgacaaacagtaatgtcagtaaaaaggctgactcaactgcgctgaccgccctaaccaaccgagtgacgtctgccgagggcagcatcacttcgcaaggtcagagcatcaccagtctacagaacagcatcacctacggcgacaacctggtgcctaaccccggaatgctgggcgatgcccagggctggacgaaggccgggacggagaccatcgacggctatccggcggtgtactccacggcgagctataacccgacgtcggggaaattcccggtcacggagggtgagacgctggatctggcggtgtcggtaatggtcaacatcgcaggcgagataaaagtcgggctgcgtttcgacggcccgagtgtcagcaaccagaccgcgtatgccaccagccgcaccatgaccgccggggagaaatatcgcttcaccctgacgggcatcacggttccggcaggctgtacgaccgcctacatccaggcggggggccgcgccgccacgacccgcgtcagcctgtataacccggtagtgacccgtcggggcgctgggatccaggcgaacgcggccgccatcacctcgctgaactccacggtgacgcagcagggcaaggacattacggcgaacacgaccgccattaccgggctgacgagccgggtggggacagcagaagcgtcggtcaatgccctgaatgagacgacggcggctaacggtctggcgatggcgaacggcttccagcaactgcgtgcgcagatcggcgacaaccaggcggccatcacgcagacgagccaggcaatggtggatcttgagtcttcaacggcgcagcagatcggcacaatcaaggcgtcagtggatggtatgagttccaccgttcagcagacttcaacggctgttgcggatatcaacggcaagctgtcggcgcagtggggcgtcaaagttcagactgacaacggcggcggaaacccgcgcattgctggtattcagctgggcatcgacgcgagtggctcttctcagttcctggttcaggctgacaccttcgcggtgtacgctggcggcagtaacaagacgttcccgttcgttgtgcagaacggcgtggcgtacatgcaggaagcgctgatccgcgatggctcgatcaccaacgcgaagatcggaaacgaaatcaagtcgaacaactttgtcgatggctctcagggctggcgcatcggtaaagatggcagctcgcagttcaataacgtgatcgttcgcggcagggttgaggcgaatagcggtattttcaagggaacggtgcaagctgagtcttttatcggcgatattgctacttctgcatcgttcaacggatttactgtcaagggcggtgaaggttctggcactatgaacgcatggtatcagaaccgcgggtatccgatgaccatcacgctgaactgcactgtgcgatgcaattcatactctggcggtgtaggcgaccaaagccgtgacttctatgtggttctgacattcaacattaacggagtgcagagcacgagacgcgtcgttgttgatatgcgggataaagcacacggccttgtggatgttccgcagtcgttcactgttaacattccagcaagtaacgaccgaatcggcatctcgctgactggcgcaagttatgggccgcagcagagtgaagtcacagtaagcaacattgttgtgacggcattccgaagcaacaacggttcttttggacaataaggagcggcccttcggggccgatattaaatggcaaatattagcgaccaactcgcggctgatattcacaacgcattcagcaaatactacacagacctcgccaatcaggatcagatcttcttcggcgttggcgacgtgcagatcaccaagcaggacggaaccaccgcaacagtgcgctcatggaacaaggtgatcggctcagtggataccgcagctcaacgaggagcggcgaacaccttcacggccctgcaaacgttcagcgccgggattaatgtttctgtcggcaacatcaacgtgatgaacgacaacagcatggtgatccttgggaaaaacagcgatcttgcactgcttaaaaagagcggccagggcggcaccatcgccgtcggtagcggtacgccattcaagatccagcgcacgaatacagcaacagtctcgccgtcttctacggtcgaggatattttgaccatcggaacggataagaagaccacgctacccggggcgctttccactggtggggatgtagtggctaaggggctgctgtatgcccaggcgattgagctgtcatttggatcgccatacatcgacttccattttaactacagcacagacgactttaccgggcggattatagccactgccgccgatcaaattagtgtgcaaagtagtcatttgcgagttgacagggatcttcgtgtttttggtatggcagacattaaagggtggacgcaatgcggcgtcgatctttcgtccaacagaacagacttcggctcccctgctattggttcgttggtttcaggtgggaggattcgatctcgaatgctcggacgcggcggtaacggtgacacctacggggcgtggggcggtttctatgttgaagagtacgtgggaaccgaacacaggattatcatgtatatggacggcttcgggagaacagacgcatggtcattccgctcaggggggacaatctccacacccaaaggcgacgttctaactaccggctcagacgttcgcctgaaaacagacttcacccaagcgcctgagaacgcctcagagcgcattgaacgcttgggggtgtgtgagtacagggtcaagggagaaacgcgcgttaggcgtggttttatcgcacagcaggcggagaccgtagacgaggtctacacctatcaggacgtcgagcaggagatcgatggcgagaggttccgggtgatgaacgtggactatgtggcaatcatcgctgacctggtgtcttcggtgcaggagcttcggaaggagttgagggcgctgaaaggggaataaaaaaaaggggccatcggcccctttctttacagcacgtgataaagcacgttaatcacgaagcccaacacgaggccgatcgctgctgccagtagcggctgtttcattttctcaaacatgctcttcaccctccactttaacgagttcatgccattcgatgcccaggggcttcgcaaggcggatcatggtttcaatggtcgggaactcacggccattgtcataacggcatacgcggcactgcgcaatgcctgctgctttcgccagaccacgctgggaaaatccagcgcgctcgcggtgttctttcaaaatcagtgtgatgttcattttctacctcagaacgggatatcgtcatcaaagtccatcggcggctcgctggactgctgctgtggttttgactgctggcgcgctgggccggaatgcgtgcgcggctgtccctgagtctgtccctgcgcctgcccctgctgtcctccttcgctcttgccgcctaacatttgcataacggcgttaggcccgttcagaaccacttctgtcgtccatttctcgactccgttgctgtcagtccattttcgtgtttgcagctttccttcgacgtagatctgagaacccttcttcacgtactcgccgacgatctcagccagcttcccgaagacgacgacgcggtgccattccgtttgctcctttacttcgccggtctgcttatcgcgccatgattctgacgtcgcgatcgtgaggttagccaccgcgccgcctgacggcatgtagcgaatttctggatcctgaccgatgcgacccacgaggatcaccttgttaactccacggcttgccatttatagcgctccttaaaaatcttcttcgacgtctgatagctgcggcggtacatcttgcggctgaacgtcatcaggtgcaacctggacggtagccttaccgcgtttagcattggctggcttgccggggttgaacggtcgggcctccgcgtttttcagctcgacgatcttgctggcgcgggcatcttcgacgatgcgcagtgatgccttgtcgctgcggaaaagctcgcacgcggcgcggtagatggcgtcgacttcgtccttatccttcgcggcttcaatggagcggcggcagtcggctgcgctacgcactgatttgttgccatcgtcgtcatccatggtgaggccgaagatcgaaacgcgggcatagcggcgggcgtaggtaagcgttgagccgaagccctgggcgtcgttcttcgccagcgggatctggcagatatcggacagccattcgcctgtggcaacgtggatgatgcgcgtctccatcagcatcacgttcggagcctgtccggcctcgtgcgtcggagactggatcatgatcaacccggcgtcttccattgccgggccgatggcggccgcaacgtctccgagggtagcatagtggtttttcaggtgctggttctgcttggacttcttcggcgatacgcacatatcctgcgcgtgggcaaactgcttaacgatggtgctgcatggctgagagaatttcatcatttggtcactccttatattgagggggtaatatgtcagtatattacccctgaatcaattattttttggttttcacatcttcccacaagtggcggaaggcgttttccaggtagtacggaggatcgaggtcaatcacgcttccgccgccgtaggtcggccacgtgtcattgtcccggcaccatttaaatgtggcgatggcttcacgcagctgcgcatatccaatcatcagggttttgtttgacaaggcgaaaggagcgacgacgaacgggctgctcttctcctgcgccagcaacatcgtccttctcggtttctggccgaaagccgccttaaacccctcgcgctgcaacgccattttcagcggatacccgagatcgaagcacttacgcatgaatctttcagggttggccgtgtctgtggtcttatagtccaccatgtcggcgaacttgctgatccagtcgaggcgcaccttgcagcgcaaaccctgatagctgaaaaagatcgagacttccgacattccgtcgacgaaatattccttaaatgattcgttattaaacagaacggcgcgcatctcctgaatgatgtcataatcctgtccgcgaatgccttcacgatcaccgcgctcttcattggcctttttcacgatgtcgtgccagaaaacaacgtcagttatcccaagagctgcggcggtgttggtgactgtctcaattaattccggctctttcattttagaataaccggcaacaccgtgttctttcagaaatgccttcgcggcctcaagcgaggtaataaagttcggctgcggaataatatcgccgttatcgtcacgcttaataaagtcctctttctcaggcatgcggaaatattcacgggcaaataattccggttcgaggtggttagcgtgggcagcagttccgaataccagtgcgcgggattgctttttcttttcctctgcgaacttccagttagccgggcatgtggagaacaactcccacaagccggagccgttcatgtggtctgtctcagcgtgatagtcttcgttcgacagatcgttattcgtgaagaacagcacttcatcatcttttagcgatttaatatctgacattacatgatccccttattcatatctaaccgaagttttcgttcgatatcttcctgcctgacaaagcggcgtgaatcgcccttgcaattaactttcaatagccatttgcttttattttcaatagccggatacttcacggcaggatcgcggaacagaatctgaccaagcatcaactcggttccagtgggtacgccgcaaaataaaacctcccatagcacgtccctaataagattatttcccggcgctctatatgtgagaaccactttctttaatgatcgcataaggccgtaagcctctttaaatgttttgcggtcagtgttgcgaatgccgccgtgcaatattctgtgtaactctgcatgtgtcatgatgacctcctgtggggtgttcgggcatattacttccgcataatatgccctgtcaaggctatttaattgagatggtcgacggcccgaggaagtcgatcaccgccagcttcgcgcagtggaagccatacgccaccgcggcgaacccgccctgagcagatacggcgttcaggcattcaacctgctccttgctgactggcgtcgacagctttttagtctctcgcttcatctcgatcaccccgaacggctccccgttgcggccacgatgcaggatcacgatgtcggcaacgcccttacggagtcccttcgcctgctggcgcaggaaatactgcttcccggccttcccgccgttctcgttcggcacatggaaccagtacacgtctggataccaatgattaaaccaggtggtaaagttaaccaggtgatcatcctcaagcgctttcgtcggttcatctggtgggtaaagatattctttaatcacaggtcatcacctccttcgaaaattttacgggctatgacgtcgcgagactttctgccgcctatgcgccggtgcgtcacacgcttcggcgctgcaatcaggtgagcggacggcaggatcttcgtttttacccctttccgcatcttgccccgggtgttcggtgatgcaacgtgcttatccagtgccgccttccactgctgttttgctggcatgctgtcactgtccggccaaaacacctcataggctacgaagtcaggatccccctcattccccagcacgtagcggaacaccacgccgtttccgcatttcgtcggttcaacgttgaaggatcgcacgtccacaaagtcatcccgggtatagctctttttctcaaggctcctgtttgggtcgatcaacgtgttcccgcagtgggcgcactgccgggcggtgatgtcgttctctgcgccgcatccgcgactgacaaccaccccacgatcgttcttaaagtcatcgcatgtgcgcgagatgaaccagtggtgacagcggtcgtccttgcggtatggcgtgccgtcttcctcgatcccgtcgtggtcgtacacatggcggcaccggcgcgcgtgcttgccgttcgtgtgtccataggggcattccttcgtctggccggtgctggtgtccgtctcatagcggtactgttcaaggaatggcgagaagtacagttccgccaggtcgtccagcgctccaccgtagtcgagaacaaggttgtcctctttgaccatccccagctcttctatatggaattttttgaggatgcgcatcccgcgaccgatgagctgaaccaacagagtgaggctgccgatcttgcgcaggataacgatcgtgtcccacggtggaacgttgtatccggtagtgaggcacccgatctgaaagataaatttgcagcggttgttaaatgcgtcttccagtatccgatcgcgctccttctgtggcgtgtcgtcggtgatgatcccgtaagtcacgccgggcggtaacgcgctggccgcctccttacagtgcttcttaccggcgcaggtaacgagtacgcagttacggttggcggtacgcttcacgacgtcgagcatgatgttttgcgtgatggttccctgggacaggatctgcttctccatctcgatcaggtcggcatcactgaattcgtcgtcaccctcttcgccgcgactcacgaaggaatcaagctgataggtcagctcatcatcgatcgcaccgtaatgggtaggcaccaccgcgccaacttcaaccaggtactcagtggagatgtcacacaccgcacgccgccagaatccgggggtgttcctgtcttcgttgatgatcggctgtgtgcctcggtagtcggtgccggtgtacccgataacaaccagatcccgaccgtacatctcccggcaacggcgctgcatctcccggatgataagcgtgtacccggtgcggccagcggcgatcatctgcgccagcgtgcgctctgctttgcgctgcaacatctcgttttcaggattctgatccgcaagcgtgcaggtcatctcgctctcaacgatgtcgtctacgttgacgtgatggcattcgtcgatcagcaggaagcgcgccacgaagttagccagctgcttttcaagggcgttgaccaccgtcttctcgctgccgcaaatgatagggaaggtcgtggacttcatgcgcaggccagcgctgaacacgctgttctccaccccgaagttccgtatctccatggcgtcctgcttgatgatcccgccctgacgtgacaacactagcgcggtcttgttgagctgggtcaggcggcgggccaccaggctgatctgcgtggtcttccctgccgacacggcggccttgacgatgaacgggccgatctccttgtagttgttgatggcctgagacgtcgcaaagtgtgcagcgaactggaacgggtagggatcgtatggcatgccgcgaaggcctctaagcagctggctgcgaaccgcctctatgtccgtctcctcaatcatttgcttgatgcttttcaccttttccattgttgcctcgttgacgtggtaaacattgcaatatattctgcacaacgaataccaaaacacaaggactttaaaatgatgaatattggcaaactaccagaaccagaaattcacgagggcgcgatacagcgggcttttgtgcgttctatgggcaactcattccagatcatgatcccgaactactacaccccggacaacctgggctatgaggctgatatgttctgcatccgcaagagccgctacacggtggaagtggaggtgaagatctccattgccgacatgcgcgctgacttccgcaaggcccacaccgtttacccaaagacagcggaggaagcagaaaaatactggcgatcagacgaaaacgagcgcgtcccgtacccggtgaagatgaagcatgactgcctgaaagctggtgagctgatagccaatcgcttctacttcctggtgccgtggactatcgccgacaaggcgcgggagatcctgccggactatgccgggctttacgtgtacaaccagcgcggactggtacacgaggaaaagatggggccgatgctgcacaagcgtaagctcgatccgaaatatgaccaggggatcatggccaacctcaacacccgctacctgaatctgtggaggaggtcatgaagttctaccccattgagcagatagaacgactcatggtcgggcgctgggaggtgctgctatcccagtattgggataagcgcgcattcaacggcaggcatcaggcctgcccgctgtgcggagggaacgaccggttccgctggggcgaatcgaagcaggacgtcacgatgaagggtcgcggtgctgcaatttgcaatcagtgcggatcacacctgggcctgtggtggttcatgcaaactaccggctacgaattcccggtggcgctgcatgagataggggccaacttcctcaaggtcgagcctgaccaggaaatgacgaccgagccggtgatcgcccgcgacgcattcccgaaggctccgcgcgtcaggctggaagagaaaaacttatcagcctctcagaagtacatccgcaagcagcaggccgcgcctgactatgatcgccggttctggatggcctacgacctgatcgagacgatgcgcaaatatcacatgtgaaatacagttgacaggtatatggtgcccaagtaatatgcccgaacacccaacagaaggagcagcaaaatgtcagaacaaaccaccgtgtcaccgaagaccgccagcgcagtagccgaagaaatcaaaaaagctattggccgccgccgtatcccggtaattgtcgcagaccaaccggccatcgcgttcatgatcgccaaagaggccagcaaaacaggctacggcgaagatgagcagctgggagtgaacgccggattcaccgagaaggacgtggtgaaccagatcgctaacgccgcgctgttcagaaagtcatataaccgcgtccagcacgtcgtcgtcatcaagtcgagcaaggcggcagcggctggaaactttgatggccgctacttcgtgaagattatgtgcaatcgcctgtatgtcaccatggggagcctggctaactatcttgcgggggcggaatagtgagcggggcaaagcccgtggtgattggctgccggaaaatgatcaaaggcagcgagcgcggaaagatggtctgctgtgggacatacttccacgctggcgggcgaagcagatgctggcacgtgatcgataatgtcgtggtgtgtaaacgttgtttcaaagagtggaaaaaggagcacaaagatgaagaaagcgatatttctgtttaaccgctcgcggcacatgttgcagccgtggttaaacgctggctatgagtgctggacgttcgacggtcagcttcctgacggtgttcacgaggttgagccgggattgatggcggttggcatgtggttcgacgcctcagctaccagcgtgcatgccagcgacgtagccaggatcgtaggtggtggcgtgaagttcatcgcctctttcgcggaatgcacatatctgaccactaccggcgcgcgctggctgtatcacccggaggatcgcgaacttccagttgctgagcgccgaccacacccggcataccccaaccgccgccgggatatggaggacgctgtgaagctggcgaaattcgttgagctggtggaggcatattgccacatcgtcaacggtgatttttccaccggcccgatcccgtggatgctggagaatccggctcgatcattcctgccgaagctgtggcgcaacttcaatcacaccttcaacccgtgtgactatggcggctatatcccggagggtgaagagatgcacccggactacccgggtgtcattcctgaccgtgacgcctataccaagctgaccgggatctggtgcagtgaagcgttcgtgatgcccgagccgaagccggtggagccggtaggcaaggacttcaaccgggcgatcaaggtcggcggaaagagtacccgcaccaagaacatccgcagcgccactccgcgcggattcgctctggctgtattcgaggcaaaccaccgtgcataagttcattatgacactggaagattaccggatgtttgccactcgtgaagaacaccgcgtgatcagcgttgaagagccgccgattggcgatgcctgcatatcgtgtgagggccgccttgatattcacgtacaggtgatctcctgtcgtgaatggacgttaggcggtcagctgttttatgtgagcaaaatcaaatatcggtcaaataccccaaaggaaacgaaatgaaagacgaagcagacaacgtgactatcgacgcattcgacgcagaccacaacccggcactgcacgcgaaagccgcagcaaagggactcacgccgtggcagctgttcagcaatcgcgtatgggctacgaaggggctggtgactggcgggcactaccaggcagttcgcccgcagaaagtgaccggccgccggttcaacgggagtaagacccctgataacgtccgcccgaactggcgcaccccggagcacatctttgcatggctggacatgacttacggcccgtttgaggtagatcttgcggcctgcgagaagtcgacgaaatgcgacttctacttttgcaaggaagagaacagccttgcgcaagactggagccagtttgatgcgatgtttctgaacccgccttatgacgacatcacgccgtggacggagaagagccgcgagatcaaaccgggcgcagtgctggcggtggtgctgccgaacgacaacagcacagtgtggttccgcaacatggtggatcaggcctacaccatcatcaacatcgtcagcaacggcaagaactctggccgcctgtcgttcgaacacgctggcaccgggaagccaggcaagcagaacaacaaaggcaccgtgctgttcatcctgcgcggtcgtaagcgtcgcgccggtgtggagacgctttacatcgatcaggatcaaatgctgcgcgaactggggttactggatgcacagtaaggcgcaagtctggcaggccgcgaaggaatgcggcctcgacgaattcattaccgccgtgtcaaaagcgtttcccggcgcgattgacggcgtagcgatatctgcgaaagggatcggtgttctggcgactgacgaccgcatgctgcgcaggctggtgagggttaaacctggagtgacgctcacaaagcaacaggtcaaggagataaggacgaaatctggtgttactatgcgatataaaggggaaaattgaggagtagcaccgatgggtaagacgtacccgaggcacaatgcccgcactgtatcacgggctgacaggctgcgcaggatgaaccaagataagaacacgcgagtcatcaccaaatacatcgccgggacactagcccggctaccagaaggagaagatcatgacgttagcacaggcaatcttgaaggcatcaaccgaagggcgagatcttaaagtaggaaagggcgtagatcgtgagaacaagcacataggcccgcggaacggtaagttctggactgacgaacgcattcaggaagtgaccgacgacgtcaccgttcggcggatgacgaaggcgcagatcatggagaagcacaacatcactgaaagcggtttttacaacgcctgctaccgttttgggatcccgacaacaaaatgaaaaaacataccgttattcatatcgacacggctgaatttcataatgccgtctacatccttggtcgtgaagagaagatctataactggaaccagaacgtcgagttccgcaaacgccttgttggcttactgggggagattgcagcagcgaagcacctgaacaacattcacggccgccaccggatcatcatcccgatgggagtcaacgcgcgcactggcgtatcggttaatgcgttcggccagggtgacatcatgaccatctcacgcacagggaagcgcgaacggcaaacgcacgtctatgaggtgaaatccaccgagggcatcggcaagcagttgccaaccatccggcaggacaacgctgaaagctacgtgatgaacggcgttgatgcaatcattctggtggcggtgcagatcaacaaggcgaaggcagagtgccggatcatgcagcaggtatcgccggttgaagtgatcgagaagtggcggccgatggttaaccggtacggtcaggagtgttatgctttcaactaaatagactttgcgcttatcatggcccccgttaacactcacgggggcttttcttttgggcgacttcttccacggcatcaccgacatctatcggatgtataagaccgacttagattaccccatcgctgcggccgtcatggctacattgcgtcacatccagctcggtcacgaaaggcgacagatctggactaatgcgatcatggcggcaatgttcgcgaagggcatcaccttcatcatcaccatcatcggggattccgttccgcggatgcactggatcgcaaaccaggatgcaggctggatcgttgcctgcgtgcttgggtacgttgggatcgacaaggtcattcgcgtggttgagcggtatttcccgtccatgaatctcagggggaaaaatgatcggcaaccttaaaatttacctgctggcggcacttgccgcctttttgctatggcagggcggcagctatgcactgacaaggtacggcgaaagccgttatgaaagcggcgttacagctgggattaacaaggaggctgaacgcagaaacaaaattgaccgtgatctggcagaaatgcgccagagggagaaagaccaagatgatcgcgacacgactcgccggattgaccaagcacgcgctgacgctgctagtgctgcttatgctgctgacaggctgcgccagcaactcaactcagccactgccatcgcaaaacaacgcgcctccgctgtcggcgttagcagtgatgccggaacgctcgccgatctgctcgccgagctgttctatcagtcagtgcaagcgggtaacgaactggcagcagaagctgatcgatactacatcgccgggcagcgctgcaacacccagtacaaccgactattgcaagcaacaaggagtaacaaatgaggatgagtgacaacgggctgcaatttacagcagcatgggagaaattccgcagcgcgccttacttcgccaccgaagacgagcgccgtcgcgggatctacacctggggcttcgggcacactggccgcaaccctccacgcatcaacatcacgcgagaagccgcgctggcgatcctgcgtgaagacgtagcctatgctgagaagaaggtgaacgagtgggcgcacaagtccatcacgcaacccatcttcgacgcactggttgatctggtcatcaatgccggtgaagagccaatcaagccggacaagaaggcgggagacttcgacgacctggtgacgcaaggtcgctgggatgagctgatcgttcagctggagttcttccgcaagcagggcggcaagatcattcccgggctggttcgccgggcactggcgcggcaggcgctggcgaaggggatgaactggcgggatgctgaggccgttggccggaacgcgaaggtgtaaaaaacagggggccatttggccccttgtttttagttcagaacaatgaaactcaacagcagatagccaggcgcgtattcgccaacgttggcgatgtgagtcacctcaaccctgatcacccttcctgtgtatccgccgatctccgtccactccctcaacatcagggtgtcgccctcagcgtaatcccggtcgaacttccttaactccgctcgttttttaccagaaacagccgcgttaaagtgaaccgggaggattttaagatcgtggatcacttcatccctcccacgacctcagcgccgatagccgcgtacccagcgaggtcttcgaacgagtcggtgttgtcgtcagtctgagcgcggcagatctttaaaatggattgtagcgtcaccacgtccaggccagtcagcggcatgttctggcggttcgcagacgaacgcacgatattgaatgcgtcagctacgcggtcgaactggcgctctttgccgttctccgcgccgtagcggcgaccgcgctcctcaaggtggccctttaccttctcaagaacctgggcggcgtcaagaggctcagaggagcttttaggggcatcggccttttcggcgaccatgtagatcgcggttccatccgtgcgagcacaatcgcggttcagtgtcgcgatgttgtcgtgagttagcgcagactcatcagctacgccgtggtggcggaagaagttggtcgggaattcgatcacgttagggacagaatattcaccgtgatctaccaggcaatgccagcgggcgatgatggtttcctgcccggaaagctcaccgtaggataggaacgtcaccagcgagttgcggccagggatgttgctaccgcgcagaggatcgttgccttcatccacttcgtaccagaagcgcaggatgtcaccagcagtgaagcggtcggtaacgtcagttgtttttttcttcttggtggtcatgttcatttcctcagcattgcattagtgttttgcgccagtcggcgctttcgagatcgacgtagcctagcagaacaggcaccccttctgaactccaaaattcagaacggtgattcacgaacggctctatgtcgtaggcatatagcgcgccatccatatccaccgccacccaattcgcccagcgcggcacggttatgaccatgccgttatagttgaataccttaaacagcccgttagtgatcagcttcataatcatccccaaagcacggaacgcgcgggtaggtcactggtgcataggcctcgatcctgaaatcgcggttacggtcgagcggctggtagaatgaactgaactccgggtgaatgccttcctggcaccagccgacgaagaagaacggttcgccgccttcatcggtgcggccgtcccagcacgccagctgttcatcggtgtacccgcattcgtcgaaattaacgtaccagaagcggcggatcaggcggcagttgttacgcagacgcaccaccacccaaaactccatttcatgcccgtgctcaatgtcaggggtgtcgcccaaagaccagactgacggcaagaattgttcgaatactggctctttctgtttcatttgcaaaaatcctctacgttgatgaagtctggggtcataaccatgtttcccgcccgtaggaagctcaggccgaagcggtggatcagggtgctgcactggtcgatgtcgctgtagtgcatgcgacgccagaatcctttcagtgtcccgacgtcgtcccagcgaacttgcgggcggtcgatgaactcagcgcggacgaaccggccatagtgccaaacccattgcccgggcttcacgtcggcgacctccacgagcttagtggggaataccgggatcttgctcatcgtgctttcacctcgccgtagtatccaacgtccatcaggtcggacacgaccgcgatgacctgcgccttcgcctcatcatctgccttgttgttggcaatggccttcatcactgcgctgcgggtgacgtcgaacatcggttcggacacgttacccttgcggtagcgctcacccagcttgcaggcgtccttcatgaccttatccatctgcgcgttatccggcaggcggtcgtatacaccaaggtcgcgctggatattgatgttcttgatgccaacggcgcagctaactgcgctggcgtccccgacgtatgagcatcccagcacagcggcggcggcgatggcgatggcggtaatgcgtttcatcggttactccttattaccacggatggcggcgatggtttcaatgtggcggcgctcttcctggcggcggcgctcttcttcttcggcgatgttacgcatcaccagcagaaacaggatcgccagcagcggggagaacaccagcgacagcagcgcccaacccagtccattacgtccacgacggtcagcagcgatgcctaccagtaaagccagaacaccccaaataattaataagctcatgattatctctcctgttagtcccggcaccctgccgggatctgcatattagtacggaataataacccgtgtcaacactatagaataattccagcgccgtgcgtgtaaacggtggcgatcgtcatcagctcaaggcgcagcgacttcaacgccccggcggcggtctttgcgtcgatctcggtgacgtggttctttgagtcggtataagacgccttaaagcggttgtgcccgtaggcgatgcagcgcacgcgcccgaactcgacgacgacgcggtaggtcgtatcctttgtcttgtcgttgacagcttccagtacagcgaactgcgcgccgggcatgagcatggcgcagatatgagcaccaagctcgcgggcttcgtcacggttggtgatcttcttcatctggtcaatcatttcgggcctcctcgcggcctgcgggcgtgatctcgcacgccccggtagttatgttccactttgccagcccgcggctgacaagtccgttcagcgcggtgacggtatgtgacttgctgtcgtatacccaatcgcctgcgcgccattctgagacagcaagccgctttaatacggcccgctgcctgatacgcagcttcactcagggcgacccccggcagccaaccaagcagcgtaagcgatggagcgcgtcagatcgcacttcatggtgatcttgcggtcttcatcagcgttgacccactgcgagaacgtcagattcagaggcataggctcaccctcagcggctgcgagcgcatggtgatagctgttcagcgacagcagcagggagactcgctgccgggcagtcatttcacgcatgatcgcccgcacgcacatggaggcgctccccgccccttcatgcttgcgctgtcggccatcccaaaactggaatttcatcgacagcggtggtcttttacgtccgtccataatttcctcctgttatgatatatattcgacggtttcaggaatgatcgcagcatatttgcagcgttttagcgctggtatgtaccagaaagaaaacatccgttcttcgcctgagctgtcgtcaatgtcaacgtgacacaaagacgcctcatagacgatcccactggcagcggtgacgcgaactcttgggtagacgatccccttccatgcgccatcaattcccttcatgaacttgttggcggcttcgtctgcgcgaatgaacgacggttggtcgtggtaagggaagaaagcgacctcagcgccattaacgacgacggtgacgcatttactcataggctcctccggttgtggcccccgaaggggccggttgtttcagcagatatggtcaacaatatttatcagaaaggcagttcgctatcgatccccgtcacccgcgggcgggccatcatctcaaggtattccttttgggcctgctcctgcgccagttttgcgagacggcgaacgctaaccatcatcttgacgatgaagcgggccgggtaacggtcgagggcaagcagatcctggcgaacgcggtcaacggcacgctgtacgccgatgtgcatcaggtagccgttgtgagagtagtggcgggcacactgaacagcgcggtcaacgatgccattaacttccagcgcttcggcgtgtgcttcctggcgggctgcgtaggcgcgctggccttcaacggcgtccagcagtttagccagcagcgctttcacgtcgcacaggctggaattagctttccactctgcctggttccagtcgtcgaggttggcggagatgtaaccttctacagcctgctgcatatcgtcgtacatggtttcgtcaagggtgtcgacgttttcgcagatcagggcgttcgctgcggagtcgatgatcaggcatgccagcaggtcggcattcttgaactgtccacgggcttgctcgttggtcatccagcttgccggattgccgatggtcagatccagcgcggcgagaatttcgttagcggcggtaagatatttgatagctgacttagacattttgcgaccccttgtgatttatcggttagttactgcctgttcgataaatatattataggggccgcatcatgtcaatagtgcttacactactccttaatgaattctttgaaatctgcggacgatgtctcgcgccaggtcatcagtctgccgttaatgatcgcgtgacgctcgcagttgtaatcgtccctgaatttcagaatggtcatggtgttcaggccggtcttggtggtcagcttgcgcatgctgccagctttagcgagaagcgcggggatgcttgtaacgtggcaaatcaggctcatgttgttttcctcagtggttatcacggcagctacccatcagcgggggaacggcatctttgatcgtgtagtaagggttacgggcttcgtgtgggttagactctttgctcaggtgcccaagctcagccattttgtaaattgcgtcgcgcactgactcccgggaatacggcgtcccgtcagccttaaacaccgtggagcttatacggtgcaggatctccttgtatggcgcggttccgtgcggctccgccctcagcagcgaatacacggcctcctgcaatggcgtgtacacgtgcgcctggcgcttctcctccggttcaaagtgctcctcatccgttccggcgtccatatcgtaaacgcggtcttcgaacagccagaccttcgtcgcgtcgtcgatgtagatgaagtctggccgatcgacctcctgccctggggcaagtttcttctcatacgtgctttttttcttcgcctcaacgtccttcgcgaacaccggcacctgaaagcctttgagcttaaagcgccccttcaaaccaccctggcggctcttgccgacgttcaggacagtgtagcctgtctccttctggcgggcgttcaatcccttgccggtctgtgtcttctcgcgcaccaggctgaacgttttatacaccgcgcccttcgctgcggatccgccacgagactcaagatcatactggccggacatcaggcttcccttgcttacgtgcgggatgaagatccctgcgcagttgagggactcagcgaaccggtgcccggcagtggtgatcagctgctggtcggtgttgctgttttcgtccatgctcacgccgttattgttggccgccgccaggtggaacattttgctgtcgaagatgaccagattcaccggcctgccgttggcgaactgcaacacgcgactcttctggatgcgcaactttcctggctccatcaggtcggccgggcgcttgaacaccttgatccagtcacggagattgacgccggtgcgcagcgaccaggcggccacctgcaactcaacgctgtccgggtcttcggtgaagaacacgctgacgcccgggttacacacgcggaagcagttgaacagcgggcgacccatggcgaggctgaccgccatttgcaccagcagcgtcgttttccctgcgcctgcatcaccgttgatctcgttgatggtgcggcggttcagcagaccttcgatcaccgggtcgtagaagtccggcgaggtgttcagcacgtattcgcccgggtcgtaatctttcagcgctggatcttccaccaacccctgctcaacctcttcggcgagacgctttgccacctcaacgcgctgggcggacaagtccatgccgagattctgcttttcattctcctcgcgaacgatgcgttgcagctcaaggtggcgctgaccggcgtctttcttcttcggcttaggtggttcaggtggaacaggtggcgctacttcttccgcctgttcacgctcctccacctcagcacgtgctacctggtcgaagtaagcctgcatgtcggccatttcctgcgaataggcttcgtcctcttcctcgcgggtcattggctggttgagaatgtccgccgcttcgtgctgtttctcctgatcgcccagcaacgccttccagtcgtcgggcgtcatcggccttttgttctcttcgttcatcgtttcctcctgctttggttcggacattattcacggcaggtaataccgtgtcaatatcaattactttccgcctgaaaaacaggctaaaacctgtaaaccaatactatttatagactgtaaatacccgctattgggattttcatcactccgttagttttcaatggcttacagagtacgttttttgagcagctgtaaaccaaagagtttcaagcggagccactcgccacctcaacgccacctgaacagaaggcgtatttcgcaagttattgataacaaaggactacctgaaattttcaggaggaaaatggtcatactaccgaacttttaagtgtctgatattgaatggttaatttcaggtgttaggtggtatccctattatatataaaacccatataattacagaaacacgtacacccttacgcac

SEQ ID NO: 74 - DNA, 41506 bp, unidentified
  source 1..41506: mol_type = genomic DNA
atgaacgcattaaacattgcacgtaatgacttctcagagattgaactagccgctattccgtacaacatcctcagtgagcactacggggacaagctggcacgtgagcagttagcgctggagcatgaggcgtacgagctgggcgagcagcgtttccttaagatgttagaacgtcaggtgaaagctggtgagttcgctgacaacgtggccgctaagccgctggtcttaacgttgcacccacagctgaccaagcgcattgacgactggaaggaggagcaggcaaacgctcgcggtaagaagcctcgcgcatactacccgattaagcacggtgtcgcctcagagttagcccttagcatgggcgctgaggtgctcaatgagaagcgtggtgtgtccagtgaggcaatcgcactgctgaccattaaggtcgtcttagggacgctcacagacgcctcaaaggccaccatccagcaggtatcctctcagttaggcaaggcacttgaggatgaggcccgcttcggtcgtatccgtgagcaggaagccagctacttcaagaagaacgtagcggaccagctggacaagcgcgtgggccatgtgtacaagaaggctttcatgcaggttgtcgaggccgatatgatagccaaggggatgctgggtggtgacaactggtcgagctggaagaccgacgagcagatgcacgtggggaccaagctgctggagctgctcatcgagggcactggtctggtggaaatgaccaagaacaagatggccgatggctccgacgatgtgaccagtatgcagatggtccagctggctccggcctttgtggaactcctgagcaaacgagcgggcgcactcgcaggcattagcccgatgcaccagccgtgcgtagtccctccgaaaccttgggtggaaaccgtaggtggtggctactggtcagtcggccgccgcccgctggcactggtgcgcacccactccaagaaggccctgcgccgctacgcagacgtgcacatgcctgaggtgtacaaagcggttaacctcgcgcaaaacacgccgtggaaggtgaacaagaaggtgctggcggtagtcaatgagattgtcaactggaagcactgcccggtggctgacgttccagcgattgaacgtgaagagttaccaccgcgcccggacgatatcgacaccaacgaggtggcacgtaaggcatggcgcaaggaggccgcggcggtctaccgtaaggacaaggcccgccagtctcgccgtttgtcgatggagttcatggtcgcacaggccaacaagttcgctaaccacaaggccatctggtttccgtacaacatggactggcgcgggcgtgtgtacgctgtgagcatgttcaacccgcaaggcaacgacatgaccaaaggtatgctgacgctggccaaaggtaagccaatcggtctcgatgggttttactggctgaagattcatggtgcaaactgtgcgggcgtcgacaaggttcccttccctgagcgcatcaagttcatcgaagagaacgaaggcaacattctggcgagcgcagcggacccactgaataacacttggtggacccagcaagattcaccgttctgtttcttagcgttctgcttcgagtacgcaggcgttaagcatcacggcctgaattacaactgctctctgccgctggcgttcgatgggtcatgctctggtattcaacacttcagcgcgatgctccgcgattccatcggtggccgtgcggttaacctactgccttctgataccgtgcaggatatctacaagattgtggccgacaaggttaacgaggtgctccaccagcacgctgtcaacgggtctcagacggtggtcgagcagattgccgacaaggagactggggagttccgcgagaaggtaacgctgggtgagtccgcactggctgcgcagtggctgcaatatggtgtgacccgcaaggtgactaagcgttcggtcatgacgttggcgtacggttccaaagagttcggcttccgccagcaagttcttgaggacaccattcaacccgctattgacaacggcgagggcctgatgtttacgcaccctaaccaagcggctggctacatggctaagctgatttgggacgctgtgaccgtgaccgtagtggccgctgtcgaggcaatgaactggctgaagtctgccgctaagctgctggctgctgaagtcaaggacaagaagaccaaagcggttctccgcaagcgctgcgcaatccactgggtgacaccagacggcttcccggtgtggcaggaataccacaagcgcgaccaagcgcgcctgaagctgacgttcttgggtcaggccaacgtgttcatgacgtacaacaaaggggacgctaaggagattgatgcgcacaagcaggagtcaggaatcgctcccaactttgtgcactcacaggatggtagtcacctgcgcatgaccgtagtgcacgccaacgaggtctacgggattgactccttcgcgctcattcatgactccttcgggaccattccggcagacgctgggaatctctttaaggcagtccgtgagacgatggtcaagacctacgaggacaacgatgtaatcgctgacttttatgaccagttcgctgaccagctgcacgagtctcaactggacaagatgcctgcggtcccggccaaaggcgacctgaacctgcgcgatatcttagagtccgacttcgcgttcgcctaaggtctcaggcaattaggtagcactataggggaaccttcgaatgaccgagggttccattacttaaagtcttaacttaaagaatacttaaagaggcacaccatgacttactcaatcgttgtaaccatcttgttaatcgtattaatcatcctgttcgtaagggccgtcacacgactcggtgcctgcgagtacgcccttgagaagcaagccaagagcaacgaggagtacacagacggcttgcacgataaggtctgccgcctgtctgaagataaggcatcactcagtagacaggttcgttacttagagggcgagcttgagagcgagaaacagaaggtgcgcgatgtgaatgaactccgagagcaccagcgggaccgcatgaagttcctccgcaagtcgctgaaggaagcacaagacgagctgatgatggtctccgacctgattcacgttaagttcaccgcagtgttgccggacggtacccactctaagacgctctttaagttaggacttgggccgtgtggtctccacgttaagtccctccgctggacagagctggatgaccgctacctgatagaccagctgtgcaccaatggcgagcgtaagcagttcgtctactacaagagcgaggtagtaggtcgcatcgagttccgccatggtaagtctgaataaggtagcactataggaacatactcaaggtcatcgttcggtggcctttatgaatgtcccttactagcacaatcaggagtaacaccatgtaccagaacacaatcaactttgagcgcaaccgtgaacgtcagcagaccgagggttacatccctaagggccgcaagctgaacaagacaaagcgcggtggcggtgtgaaaggttctttccgtaacgccaagggtgacagcgttgttaaccaagagaaatacttcgtaggagcgtaacaaatggccatgcaaactaattacctatttgacggcagcacagaccaatggtcgcgcttagggtatgccgagcgaagactgcgtgatgagacaatgttgagtgtagtcatggcgtatcacacatggaaccacacggtctctctttcggtatatgaaccccgaggggaacttctggtagagaagtccttcagtcgctggtcgattgactcagcgtcagactggctggcaaaactcaccgccgactactcaagttggaaatgattaggtagcactataggcagactcaaggtcatcggattccggtggcctttatgattgcttattgcacactaaatgaacactacacttcggagacatcgtcatgatgaacattaagactaatccatttaaggccgtatcgttctcccgctctgctatcgagaaggcgctggagacttccggttacctcatcgcagacactaagcacgatggtgtacgcgggaacatttgcgtagacaacacggccaacgcagcgtggctcagccgggtctccaagaccattccggcccttgagcacctcaacggtttcgaccatcgctggcagaagttactgaaagatgaccgctggattttccctgatggctttatgcttgatggcgaactcatggtcaaaggcgtggacttcaataccgggtccggcctgctgcgtaccaaatggctgaaggcaaagaactatgagttctccacctatgccattgagaaagagtgggacaatcctaagggtaaaattccgtttcaccttaacagcgcggacctcaaagttatcctctacgatatcattccgcttgacattatcgagtccggtgatgactacaacgtgatgaccctcctccgccttgagcacgtcaaggtcgccttaccagttctgcaagaccacttccctgaagtcgagtggtgcctctctgagtcccatgaagtttacgacatggacgaactcgatgcgctgtaccgacagaaacgtgaagaaggtcacgaaggtctggtggttaaagaccctcgcggtatctacaagcgcggtaagaagtccggctggtggaagttgaagccagagaacgaggctgatggtgtagttgtgggactcaactggggaactcccggtcttgccaacgagggtaaggtgattggcttcgaggttctccttgagtcaggtcgcgtggtatccgccaacaacatctcgcaggcacttatggaggagttcacagcaaaagttaaggctcacaccgcgtgcgataatggttgccagatgtctaaggatgtgggcatggacaatcactcctgcgcaggcaagtgtgcttacgaccaacacccggcgaataacccgtacgagggatgggcgtgccagattaagtacatggaggaaactccagacggctctctgcgtcacccgtcgttcgacaaatggcgtggtaccgaggcggaccctaccattaagatgtaattaggtagcactataggagacaacaatatgtccatcaatctgattctaatcatcgtgttcatcctcgcggctatcgtgtggtcaatgaacgacgagccacctaaaggagcataaccatgcgcttacacttcaataaatccaacggtatcttctcggttcgccgggaggaccgcagcactgtagcggccactgagcgccacggtaagattccacgcatcggcgacaccttcgagctggcacccagtgtgcacatcttggtaactcgcggtctctacgaattggctcaaactaagagccgtcctttcgtacccgtagcggtaaccaagtggccacgccttcgcctgttctgggagcgcatcaaggaggtcgtaaatgactgaacgtgaaattcaagtggtggacctactggttgaacaaaacactgaccgcccagaccccacaacgtgcgctgacggcgtcacatgctacaaagtagcgtgcagtgagtgtccgctagacgctaaaggtacgaccattggggaggtccgcgcaatgaaggacagcaaggctccgagtgtagaagacgatggtgtcaagcagccaagtcactaccagctgttcgaaggcgttgaggctatcgaggtgattgcccgcagcatgactcgggagatgttcaaggggtattgcctagggaacatcctcaagtaccgcctgcgagccgggaagaagtccgagctggctaccttagagaaggacatggcgaaggccgctttctatctggaactatacgagaaacacaaggggttgtgtcatgattgagttaacaccgagtcgtattgaaatcctgaagtattgggcgaaggacttcctcagaatctaccagacagaggacttcaccaaggaggagcttgagttcattgaggagattcttagcgatgaacccgagtgactggtgccgagagatgtacgagaagacgctcgaccctgcgtacatcaccctgtataacatgtggaaggagcgagaagatgcaaaagttcgtcgtaacggtcgagacagctaacgcatcgtacgaactcccggtacacgctgggtctcttgaggaggccctcgaagttgccgaggcggagtacgaagagttaggccaagtgactcgggtacgcccagatagtcattaggtagcactatagggacacaggctgtccctcttactgtttaaacttaaaggagattcatcatggcattcgctaagaagaagatttataccaccaagattggtacctgtgagccttatgcttacttcaacaagccggactatggcggtgagggttttgagaacccacgcggtacctacaaaggttccgtaacgttcaagaacgaagactgtcaggagctggtagacctcatcgttaagacccatgaggaaaactacgcggcacgtctggaagcgcacgaagcgaacccgccgaaggttcagaagggcaagaaacctctgaagccgtacgagggcgacatgccgttcttcgacaacggtgacggtaccaccacgttcaacttcaagtgctacggttcgtacgaggacaagaagactggcgagaccaagaagattgttctgggcgtagtggacgcgaagggcaagcgcattcaggacgttccgattatcggtggcggctccaaagtgaagattcgcttctcactggtaccgtacggctggtctgcggtagctggtgcttccgttaagttgcagctggaaggcgtgatgctggtcgaactggctacctttggtggtggcgaagacgactgggctgacgaagccgtagaaggcggttacgaagctgacgaacctcgcagccgtaaacctcaggaagacccagaagactggtctggtgaggaagaggcggacgagggcgaagctgacgaagacgatgacttctaatggctggctatggggccaaagggattcggaaggtgggtgccttccggtctggccttgaggacaaggtgtccaagcagttagaatcaaagggcgtcacgttcgactacgaattgtggcgcatcccttacgttattcctgcgagtgaccacctttacactccagacttcttgctgcctaacggtatcttcgtggagactaagggtctctgggaagccgaggaccgcaagaagcacctattgattcgtgagcaatacccggagttagacatccggttagtattctcttcgagtcgcactaagatttacaaagggtcgcccaccagttacgctgagtggtgtgagaagcataacatcttgtttgccgacaaattgattcccgtagactggctgaaggagccgaagcgtgatgtaccgttcggcaagttcaagcagaagaaaggagcaaagtaagtatggccaaggttcaattcactaagcgacaggagacctctcagattttcgttcactgttcggccaccaaggcaaccatggacgtaggtgtccgtgagattcgccagtggcacaaagagcagggctggttggacgttgggtaccacttcatcatccgtcgtgacggtaccgttgaggcgggccgtgaccaagacgcagtagggtcccacgttaagggatacaactcgacttctgtcggtgtgtgtctggttggtggtatcgacgccaagggtaaccctgaggcaaacttcacacctcaacagatgagcgcactgaagggattactacacgagctgaaggggacctacccaaaggctgtcattatggcgcaccacgatgtagcaccgaaggcttgtccgagcttcgacctgcaacgctgggtaaagactggcgaactagtcacttctgacaggggctgatatggttactcaggctctcatcatattcggattgccaatcctgatagttggtacgctttactgtatcaacaaggaatggttcagcgacggacaagagtagacaattaggtagcactacagggagacaattacgtttccctgttgtcgcacatcctgtacaaattatggtcaggcttcaggtgccactgacgtagcgctgcgtttcattcgggttcgattcccggactgaccacaccaacggagattactttatgaacaagttcaaagaacactttgctgactcgtggccactatacgtgtacgcatcggcattcgtaataggtgcacttcgggtgttgctaccatgagttacggagacagtcaagaagatggtcaggagagtatcttcctgttccacgctccgtgcgaaaactgtggttcttctgatggtaactcagtgtactctgacgggcacgagtattgcttcgtgtgtcaacaccgagtgagaggctcagaggaacgtaccgaaaagttatcatcgagaagacccaaaggagggaattacgggatgaatacacagggttcaggcttattggtattcggcgagagtgacggtcggtacactgacctgacggctcgtggtatctcaaaggcgacatgccagaaggctggctattgggtcgccaaggtcagagggaccgcctatcaggtggccgactatcgtgaccagaatggctccatcgtctctcagaagctgcgggacaaggagaagaacttctctaccagagggtctcacaaaggggatgcactgttcggtaagcacctatggaatggtggcaagaagattgtcatcaccgagggtgaaatcgacatgttgaccgttatgcaacttcaggactgtaagtggcctgtggtttctctcggtcacggtgcgtcagccgctaagaaaacttgcagtgcaaactacgagtatttcgatagcttcgaccagattatcctgatgttcgatatggatgagccgggtcgtgcagctgtagaggaagccgctcaggttctccctcccggtaaggtccatgtggccgtgttgaccgagaaggacgccaacgagtgtttactcaaaggcaagggcaaggaggttctcgaccagatatggaacgcagcaccttgggtgcccgatggtgtcatcggcgcgatgtccatgaaggaccgagtgcgtgaggccatgaccagcgaacagagcgtaggatatcttttctcgggatgcccgggactgaacgaccgaaccttgggtgcacgtggtggcgaagtcatcatggtcacttctgggtcaggaatgggtaagtctacgttcgttcgccagcaggccctagggttcgccagagggcaggggcttagggtaggtatggcgatgcttgaggagtccgtagaggagaccatggaggatgtcctagggattgctaacggaatccgcttacggcagcagcctcgggagttcaagcagaagctgatagaagacgggacgtatgacaaatggttcgatgagctgtatggctccgaccagttccatctctacgactcctttgcggaagctgaggtggaccgcctgctggccaagctgcactacatgcgcacaggactgaactgtgacgtaatcattctggaccacatctcaatcgtagtgtcagcctcggaggaatccgatgagcgcaagatgattgaccgactcatgaccaagctgaaagggttcgctaagtcaaccggagtggtgcttattgttatttgccacctgaagaacccggagaaaggtaaagctcatgaagaaggacgtgctgtttccattactgacctgcgtgggtctgggtctctgcgccaactctctgatactattattgcacttgagcgtaatcagcaaggggatatgcctaatcttgtcctccttcgtattctcaagtgtcgctttaatggtattggcgtcggcattgcggggtacatggagtacaacgaaaagaccggactccttgaaccgtctagctacactggcggagaaggagagggagatactggctgggaaggccacgaagaagacgactactaaacgtaaatgcaatggggcgtactgctggtgcgcctttgaccctgattatcaataacggaaggagaaccatcatgtttaaacttatcgaagcattaggccgtctggtcatcgcactgtatgtacgtgaagccaaggcactggacaaagcgtccaaggtggaagcgaaagcagccgctaagctggctaaggcagccgacaaggcacgtcaggcatctctggatgcaaccgcagaggcagctaaagttgccgctaaagctcagaaacttaaggagttcttctaatgactaccaaagttaaattccccggcaacaccattcagctgtccgacactgttgaccagtggggccgcaaggttcacatcaacgttcgcaacgacaaggtcactctggtctaccgctggaaggctaagagcgataaccgtgcgcacactcagcgtgtgaccctcgacgacacacaggcagctcgactgctggcatccgtagccgtagccgctactgtagctgttggtgaggacaaggtccgtgaggctatcctgagtaaagaggtaggctcaacggcaacccggctggccgaagcgtcagaagttaagtgataaactcaaggtcattactatatgtagtggcctttatgattatcatacacaacatattgagaggacagaaccatgcgtaaacctgaagaaatccgtgcagacatcgagaagctgaccaaagagctggaagctgttaagattcacgagtccagacaggttgctgctgttaacatcttgtataacttagggtggacacacgacccccacaagggctggcagaaacctgcgccaaaatgtagcgactataaggccccactgaaggctggcgagctggcaacgtgggaggatggtgcccttggtggaaccgtgtatatccgcagcgtcggcaacaaattctcacaggtgtcccacgtccgtggcgtcagtcgtctgggtgttgacgtacttacgggcagcttcgcaattgagaacagtaagttgaccatccgtccgcgtgagtatttcatcgggcgtcgttaagcaacaggagaccactatgttagtaaccgatatcgaggcgaacaacctcttagagaaagtcactcagttccactgtggtgtcatttatgactacagcacggacgagtacgtatcgtatcgaccttgggacttctcagcgtatctcgatgcgttagaagctgaggtggctcgtggtggtctcatcgtattccacaacggccacaagtacgatgccccagtgttaaccaagctggccaagctccagttaaaccgagagttccacctgccgcgtgagaacgtagtggacacgttggtgctcagtcgtttgctgtttgcgaacattaaggactccgacatggccctgttgcgttccggtaagttacccggtaagcgctacgggtctcacgctctggaggcgtggggttaccgcttaggtgagatgaagggtgaatacaaggacgacttcaagaagctccttgaggaacagggagaggactatgtggacggtgctgagtggattagcttcaacgagccgatgatggcctataacgttcaggacgttgtggtgaccaaggcgctcttagagaagctactgagcgacaagcactacttcccggagggcgatatccattggtgggcacatgatgccgtgtcgttctggggcaactcgtgtgaggccgtctggttggaacaccgtgccgcttggttactcgctaagcaggagcgcaacggattcccgttcaacaccaaggccatagaggaactctacgttgaactcgctggtcgtcgttctgaactccttcagacactcaccgacactttcggaacttggtaccaacctaagggcggcactgagttattcctgcacccccgcaccgggaagcctctgggtaaatacccgagagtgaagtacccgaagcagggtgccatctacaagaaacccaagaacaaagctcagcgtgagggtcgtgaaccctgcgagctggacactcgggattacgtagagggcgctccgtacacaccagtagagcacgttgtgttcaaccctagtagccgagaccacattgcgctcaagctgaaggaagccggatgggtgccgacagagttcaccgacaagggtgctcctaaggtagacgacgaggtccttgagcatgtacgtgtggaagaccctgagaagcagcgctgcatcgatctcatcaaagagtacctgatgatacagaagcgtatcggtcaggcagctgagggcgacaaagcgtggctacgttacgttcaagaggatggtaaaatccatggaagtgttaaccctaatggtgcagttacagggcgagcaacgcatagcttccctaaccttggtcaagttccgggcgttcgttcgccgtatggtgagccttgtcgagcagcgttcggcgcagagcatcacttggatggacttaccggacagccttgggttcaagcaggcatcgacgccagcggactcgaactccgttgtctggcacacttcatgtctaagtacgacgacggggcatatgcggatgtcattctcaacggtgatatccacacagtcaaccaaacggcggctgagttgccaacacgtgataacgccaagacattcatctacggtttcctctatggtgctggagacgaaaagattggacagattgtgggagcaggtaaggaacgcggaaaggaactcaagaagaaattccttgagaacaccccagcaatcgcagcgttgcgtgaaggaatccagcagaccctcgtcgagtcatcccgatgggtcgcaggagagcagaaagtcaagtggaaacggcgctggattaagggactggatggaagaaaggtacacgttcggtcaccacatgccgcgctcaacacgttgcttcagtcagcgggtgcgctcatttgtaagctgtggattgtcgagactgaagagttgcttatcaaagctggcttgaagcacggctgggatggtgacttcgcctacatggcgtgggttcacgatgaaatacaagtggcctgccggaccccagagatcgcacagcaggtgattgacactgcacagcaagctatgcgtaacgtgggggaacactttaagttccgttgccgtctggatacagaaggtaagatgggtcctaactgggccgtatgtcactaataatacaggagatttatcatgggtattaacaaacagtttcgcgtaacgttcgatgtaacggctactatgagtgatgaccaagagcgggagttccttgaggacctactatctcttgcgtatggcgtggacgacaaacgtcaggcgcacattgtaaccgaagcaatcaccaaaggtcatgagtcggcactggcattcgtcatgcagagtggtctgcgggaagctattaaggacctcggtaaggagctgagctgttccactgtgacagtacgcttctctccggcaaccgtgagggtgaccaagtgagtgagtacctcaaagttctggcggccctcaagggctgccctaagtccttccagtcgaactacgtacggaacaacgctgcgttagtcgctgaggctgcgagccgtggtcacatttcgtgcctgaccatgagtggtcgcaatggtggcgcttgggaaattaccagtgccggagtgaaattccttaagacccatggaggttgcctgtgagaaagagaatggtgttcgtgcacccgttagaacctaaatcacactgggaaactgctgatggcatcgtctggttttataaggatggccacatgctgcgacagtcccttgtcacccacaaggaccttcacgacccggagatgggctttaaattcaaggagttaaagaatgagtaagcacacattgttatccttcagcgactaccgggcaacccagaagattgccaagggtgtccttgtaatggatggtgactggctggtgttccaagccatgagtgccgctgagttcgatgcctcttgggaggaagagatttggcaccgctgctgtgaccacgctaaggcccgcgagattctggagaactccatcgagtcctacaagggccgtaagaaggcgtggaagaatgccgacgttatcctagcgttcaccgaccgtgtcaactggcgcaagctgctggtggacccaacgtacaaagagaaccgcgcagtcgtcaagaaacctgtgggctacttcgagttccttgagtacgtcttcgagacctacacgtgcgtccttgagcctcagctcgaaggcgatgacgtgatgggcatcatcgggtctaaccctctcgtgtacaactacgagaaggccgtactggtatcctgtgacaaggactttaagaccatcccggattgcgacttcctgtggtgtacgactggtaacatcctcgtgcagactcaggagacagctgactactggcatctcttccagactatcaagggagatatcaccgatggttacggtgggattcccggatggggcgataccgctgaggacttcctcaaggaaccattcattgtggagcctgtaacgtccgtgctgaagtccggtaagaacaagggccaagaggtaaccaagtgggtgaaacgcgctcctgagccgggagagacgctctgggactgcattaagtccattggtgccaaagcagggatgaccgaagcggaagtaatcaagcagggccagatggctcgcatcctccgttctgatgagtacaacatcgagactggggagattactctatggcaaccgggcagctgattcttatcgtcctgaccatgggcttaatcgcgcgcggtctctggatgctggccttgattatcaagcagatagttgagcacaaagcagagtgataaactcatgggcactaattaggtagcactatagggaagtgcccattatgattattacttaaagattacctaaagaggagactcaaatgttaaaacctatagagcacatccttaacaatcctaatgaccttcctgacgtaccgcgagctgtcaaggagtacctacagtctcgctacaatgctgacttcctgtatcagtcagaggtccgtaagctgcgtgaggctggccacagcgaggagttcatctccggggtactgtatggtcactacatggcttctcgtgtccttgacgagatggagggacgccagcgtgcactcaaagaaggagattgattatgtgtttctcacctaagatgaaagcacctaaggtcgacacaacgactgtccctgagccagctccgctaaccgaggaacctaagggtgtccagtacggtggagacgaagactcaaacagcaccactcctgaggtgtcaggtcgtaagtcactcaaggtgaccaagacgaccgagcctacagggtcagtcagtaaaatccgtaagtcagctttaggaggctaacatgggactgttcaagaaaatcaagaaggctatctccaaggtagtcaaggcaccactcaaggccgtgggtctagcagcagatgcgcctaacgtgcagacagccgctgagacacctgtggccgcacctcaggaagcaccgaaagaggtcgtggaggacgttgagtcttcggcagacaccgagtctggtaagaagaaaactcgtgcctccggcaagaagtccctctcagtttcccgcagctcaggcggtgggattaacttatgattggttacggggagggctaacaaatggcagaagttaaactcgaaggcttcgcagaggagggagccaaggcggtatacgaccgtctgaagaacgaccgacagccttacgagacacgagcagagtcctgtgcgcagtacacgattccctcactgttccctaaggattccgataacgcatcgaccgattacacgactccgtggcaatccgtaggtgctcgcgggctgaacaacctagcgtccaagctgatgctggccctgttcccgatgcaatcatggatgaagttgaccattagtgaatacgaagcgaagaaccttctgggtgacgccgagggtctcgctaaggtcgatgagggcctctcaatggtagagcgcatcatcatgaactacatcgagtccaacagttatcgagtgactctctttgagtgcttgaagcaactgtgtgtggccgggaacgcactgctgtacttaccggagcctgagggttataccccgatgaagctctatcgactgaactcgtatgtggtccagcgagacgctttcggtaacgtactccagattgtcactctcgacaagattgcgttcaacgctctccctgaggatgtccgcagccaagtggaagcagcccaaggtgagcagaaggaagacgctgagattgacgtctacacccacgtgtacctgaacgaagccggggatggctactcgaagtacgaagaggttgccgaagcggtggttccgggcagcgaagccgagtacccactcgaagagtgtccgtacattccggtccgcatggtccgcatcgacggtgaatcctacggtcgttcctacgtggaagagtatctgggcgacctcaagtccctagagaacctccaagagtccatcgtgaagatggccatgattaccgctaaggttatcggtctggtagacccggcaggtatcactcaggtccgccgactcacggcagcacagtctggtgcgttcgtaccgggccgtaagcaggacattgagttcctccagctggagaagtccggtgactttaccgtagcgaagaacgtaagcgacaccattgaggctcgcctctcgtatgcctttatgctcaacagtgcggtacaacgtacaggtgagcgagtcacagccgaagagattcggtacgtggcgtcagagctggaagatacccttggtggtgtctactcgattctctcgcaggaactccagctgcctctggtaagagtgctcttgaagcaactacaagccacgcagcaaatcccggagttacctaaagaggccgtcgagccaactatcagcactggccttgaggctatcggacgtggtcaggaccttgacaagctggagcggtgtattgccgcatggtcagcccttaaggccctcgaaggcgatgatgacctcaacttggctaacctcaagttacgtatcgctaacgctatcggactcgacaccgctggtatgcttctcactcaggagcagaagaacgcccttatggcacagcagggtgcccagattgctacacagcaaggggccgcagcgttgggtcaggggatggccgcacaggctactgcaagtcctgaagcgatggccgcagcggctgattcagtcggtatgcaaccgggcatgtaattaggtagcactatagggagacacatccagattgaatgaggtctggtcagaaggttcgagtccttcgtgtttccctcttagtcttaactttaaggagattgaaatggctggcgaatctaacgcagacgtatacgcatccttcggtgtcaacagtgctgtactgactggtagtacaccggaggagcaccaagaaaacatgttggctcttgatgttgctgcccgtgatggcgatgatgcaatcgagctgaacaccaacagtgatgacccgtatggttccgatgtggacccgttcggtgaacctgaagagggccgtatgcaggtccgcatctccgctgatggttccgacgaagagtccaccgaaggtgaagagggttctgaagaagaagaacagcagggcgacgaagagagtcagccggaggaagtaaccgacgaggatgagcctgaagagttcaaacctattggcgaaactccggctgacatcaacgaagcctctcagcagctggaagaacacgaagctggctttaacgacatggttgctactgcaatagaacgcggtctctcacaggatgctgtgacccgtattcagcaggagtaccagaacgaagacagtctgtccgaggagtcttaccgagagttggccgaggctggctacagtaaggcgttcgtcgatgcgtacattcgtggtcaggaagctctggtcaaccagtacgtagagaaagtgatggacttcgtaggtggccgcgagcgcttccagcaggtctacggtcacatgaagatcaataaccctgagggtgctgaggcgctcatcaaggcttttgagtctcgtgacgtagccaccatgaagacgattctgaacctagcgggacagtctcgtgataaaacctttggtaagaaagctgagcgctctattgccaagcgtgcaaccccagcgaaacctgtggcccgcaaggctgaaggcttcgagtctcaagctgagatgattaaagctatgtcagacccacgttaccgcaccgactccaagtaccgtcgtgaagtggaacagaaggtcatcgactctaagttttaattaggtagcactatagggagagatggaatctacagtttggcggtcaccagttcagttaatactgattgggcatctggctgccgtggcttggctgtagagtgcccttcgagttacacaatgagtatcacctcgtttcaagtagtaactgacgcgaccttagggcaagaccttatgataggcgcggagaattacccaaagagcttggcaacgataggcccgtttggtcagcgtaatgactaattctattcttaaacaacataaggagattcaacatggctaacatgcaaggtggacagcagctcggtactaaccaaggtaaaggtcaatccgcagcagacaagctggcgctattcctgaaagtattcggcggtgaagtcctgaccgcattcgctcgtacctctgtgacctctaaccgtcacatgcagcgtcaaatcagctccggtaagtccgcacagttccctgtgattggtcgcaccaaggctgcttacctgcaaccgggcgagtctctggatgacaaacgtaaagacatcaagcacaccgagaagaccattaacattgatggcctgctgaccgctgacgtgctgatttacgacatcgaagacgcgatgaaccactatgacgtgcgctccgagtacacctctcagattggtgaatctctggcgatggcagctgacggtgcggttctggctgagctggctggtctggttaacctcgctgattccgtcaacgagaacatcgctggtctgggcaaaccgtccctgctggaagttggcgctaaggctgacctgaccgacccggtcaaactgggccaagcggttatcgcacagctgaccatcgctcgtgcagctctgaccaagaactacgtcccggcgaacgaccgtacgttctacaccaccccggacgtgtactctgcgattctggcggctctgatgcctaacgctgcgaactatgcggctctgatcgaccctgagcgtggctctatccgtaacgtgatgggcttcgaagtcgttgaggttccgcacctgaccgctggtggtgctggtgatgaccgcccggacgaagacgcagaagcgaccaaccagaagcacgccttcccggcaactggcggtaaagtcaacaaagagaacgttgtgggcctgttccagcaccgttccgctgtcggcaccgttaaactgaaagacctggctctggagcgtgctcgtcgtaccgagtatcaggctgaccagattgtcgctaagtacgcgatgggtcacggcggtctgcgtccagaatctgctggtgcgctggttttcacagcagcctacgcgtaaatacctttagtgctcggacggtaaccccgtctgagtatgaggtacagactgtggccattgctggtgattcacttaaggtgacacttgatgggctggagggagtaacggactggtcaacccttgaggtaacttatggtacttccgggattgccagtcacacccgccggaccaacacgctgtacttcaaaggaatcgctgtgggcgagactctagtgactgtcagctttgacgggtctgaaaggaagtcctttaagctggtcgttactaattaaaactaagccaaaccccttggggaccactcacggtctctgaggggttttttcgttaggagcttacattatgaacatgcaagatgcttactttgggtctgccgctgagctggatgctatcaacgagatgctcgcagccatcggtgaatccccggtgaccacccttgacgaagatggtagcgcagacgtagcgaacgctcgtcgtatcctcaacaggattaaccgccagattcagtctaaaggttgggccttcaacatcaaccagtcagccacattgacacctgatgcagacacgggtcttatcccattccggccagcctacctgtccatccttggtggccagtatgtcaaccgtggtggttgggtatacgataagtcaaccgacagtgacacgttctctggaccaatcacagtgaccctgattacccttcaggattacgacgagatgcccgagtgtttccgccagtggattgtcaccaaggccagccgtcagttcaactctcggttcttcggagcggaggacgtagagaactctctggcacaggaagagatggaagcgcgtatggcgtgcaacgagtacgagatggacttcggtcagtacaacatgcttgacggtgacgcattcgtgcagggtctcatcggtcgttaatcagaaacttaaggaggaccaaatggctctcgtatcacaatcaatcaagaacctcaagggaggcattagccagcagcctgaaatcctacggtacccagagcagggttcgcttcaggtcaacggttggtcctccgagactgagggtctccagaagcgcccacctatggtgttcatcaagtccttaggcgaccgtgggtaccttggggaagacccgtacattcacctcatcaaccgcgatgaatacgagcagtattacgcggtgttcactgggaacgacgttcgggtattcgacctgtccggctatgagtatcaggtcagaggtgaccgctcatacgtctccgtggtcaaccctaaggataacttgcggatggtcaccgtggccgactacacgttcatcgtgaaccgaaccagacaggtccgtgagaaccagaacgttaccaacggtggtaccttcagggacaacgtggatggtattgtcaacgtccgtggtggtcagtatggtcgtaagctcgaagtgaacattaacggtgtgtgggtgagccaccagctccctccgggtgacaacgctaaagaagacccacctaaggttgacgcacaggccattgcggcagcactcgctgacctactccgtgtggcacacccaacgtggaccttcaacgtggggactggttatatccactgtatcgcacctgctggggtaaccctcgatgagttccagacgagggacggttatgctgaccagctgattaacccggtgacccactacgttcagagcttctccaagttgccactgaacgccccagatgggtacacggtgaagattgttggtgacacctccaagactgccgaccagtattacgtgaagtatgacgcttcgcagaaggtctggaaggaaaccgtgggctggaacatctcggtcggccttgagtatcacacgatgccttggacactggtccgtgcggctgacggtaactttgacctcgggtatcacgagtggagggaccgccgcgctggtgacgacgacactaaccctcagccgtcctttgttaactcgacgataaccgatgtgttcttcttcaggaaccgcttagggttcatctctggggagaacatcgtgctgtcccgtaccagcaaatacttcgagttctacccgccgtcagtggccaactatacggatgatgacccgctggatgttgccgtgagccataaccgtgtgtcggtccttaagtatgctgtgagcttcgcagaggagctgctgctatggtctgacgaggcgcagttcgttctgtcggccaacggtgtgttatccgctaagactgcacagctggacctgaccactcagttcgatgtgtccgaccgtgcgcgtccttacggtatcggcaggaacatctactatgcatctccgcgcagcccctttacctccatcatgcgttactacgcggtacaggatgtaagctctgtgaagaacgcagaggacatgacggcccacgtcccgaactacatcccgaacggtgtgtatagcatcaacgggtccggtactgagaacttcgcgtgtgtactgaccaagggtgctcccagcaaggtgttcatctacaagttcctctacatggacgagaacatccggcagcagtcgtggtcccactgggacttcggggatggtgtggaggtgatggcagcaaattgtatcaactcaacgatgtacctactgatgcgtaacgcctacaatgtgtggatagctgcggtggactttaagaaggagtcgactgacttcccatttgagccttaccgattccacgtggacgccaagcggtcataccacatctcagagactgcgtatgacatcgagaccaaccagacggtagttaacgtcaaggacatctacggtgcgtcgttctctaagggtaccgtggcaatctgcgagagtgacggtaaaatcactacgtatgagccgatgggtgactcttgggacgcaaccccagacatccgcattagtggtgacatctcaggtaaggacattgtcatcgggttcctgtacgacttccagtatgtgttcagtcggttcctcatcaagcaggagcagaacgacggcacaacgtccactgaggactctggtcgtctacagctgcgtagagcgtgggtgaactatcaggacactggtgcgttcactgtgagcgtcgagaatggcaaccgtgagttcaactatctggtaaacgccagagtcggctctactggtctgcgtctgggccagaaggccacgaccactggtcagtatcgtttcccggtgacaggtaacgcactgtatcagaaggtgtcattgagttccttcaacgcttccccggtgtcaatcattgggtgcggctgggagggtaactacatgagacgcgctaacggtatttaacttgacgtctccctgtggtgttgctcaattaggtagcactatagggagaccacactaataggggacttaaagcatgtacataagaaacactgtaagtaatgacttcgagttattcatcccggcctaccatgacgtacttgaggcacaggccatggatatagaaccatcgttcccagcggttaccgagtgtgtcacgttagaccacgatggttttcctttggctataggtggacactgcggagaccagtgctggttcgtcacgagtgaccaagtgtggagactcgacagggctggcaagctggagttccgtgagagaatcatggagtacagggacatgttattaaatgtttatccatccctgtggaacttcgtgtgggtcggtaatggtccccacaagcggttccttaagtccatcggtgctgtattccacgaggagtacactcaagatggtaagttccaactgttcaccataacgaggaggtaactatgtgctggatggcagctattcctattgcaatgacagcagtacaagccatcggtcagtcgcgcagcgaagccaagatgattggccttcagaatgaccagatgcgccgacagtctgcccagatgattaaagagtcaaacattcagaacgctaacgccagccttgagcagaagcagaagctggaagaagccagtgcggacctgaccgctaagaatctcgataaggttcaggccatgggaacaatccgtgcggcaatcggagaggggaaccttgagggtgccagcatggaccgtatcaggcgaatcgaggagggcaagttcatccgggaggccaacgcggtcaccgataactaccgtcgagactatgcgtcactgttcgctcagcagctgggcaactcagagtcaactattgaccaagttaagtccatgcagaaggctgagggcaaaggtaagtctaagctggaacaggtgctggacccgctggccttaatgggttcacagggtgcctcagcgtatgcttctggtgcattcgacagcaaggggaccaaggctccaattagtcaggcccaaggtactaaggtaggaggtaagtaatggccagtaaattagaacaagcattaagccaactgccgcaggccgggtctacccgcatccgtggtggttcagcgtccatgcagtatcgtccagtaaccatccaacaggaagggttccgtcagtccaacctcgtgcagtccttggcgaagtttggtactgcgatgggtgaggcagcggatgcctacgacaagcgccaacgggacaaggctgatgagcggtccgatgagattatccgtaagttgaccccagagcagcgccgagaggcaatcaagaacgggaccctgctgtatcaggatgacccatacgcaatggaggccctacggttcaagactgggcgtaacgcagcgttcctcattgatgacgaagtggcgcagcgtgtccagaacggtgagttccgtactcgtgctgagatggaagagtatcgccacaaacggttgaccgagggtgccaatgagttcgctgaacagttcatgattaaccctgaggacgctgagttccagagagggttcaacgcgaacatcaccgagcgtaacatctcgctgtacggtaagcacgatacgttcctgagcgagcaagcccagaagggtgccatactggcctcgaaggtggagctgtcaggtgtactcaaagaccctgccgttctggcccgcccagagtccggtgagttcttccagcgctacatcgacaacgcgcttaagactgggagtatccctagcgatgcccaagcacagcaggtcatcatcgggtcccttaacgacgtcattcagcgtccgggtgctaccaacttcctccagagccttgcagaccgtccggttaccctcaacgggaagacctcgacctataaggagctgatgggagaggagcagtggaacgccctgatggtcaaggcccagtcgactcagtttgacaatgacgctaagttgtctgaaggtttccgccttgggattaccagcgcgttgaaccaagacgataccagcaagggctgggagatgcttcaaggtgccaaagcggaacttgaccgtctacagcccggtgagcagatgaccccagagcgtgagcgtttgattcaggctgaggagcagatgcaggcccgtttccgtcaggaggcccaagcggcagccaaggagatggacaagcgtcagaagaccatcaacaagaatcaggtcatagaccagcagttcaccaagcgcatcaacggtcagtatgtgtccaccagctacaaggacatgccgaccaacgagaacactggcgagttcactcacagtgacatggtgaactacgctaacggtaagctggctgagattgaccagatgcagctcacggagcaacagaaggaccgcatgaagctgagctacctacgggcagactcagagggtggagccttccgtaccgttgtgggccagatggtaaccgacgctgggtctgagtggtctgccgctgtgattaacggtaagttaccggaggacaccacggcgctgaacaagctgcgcaccatgcgtaacaccgacccggacctcttcgctgcattgtacccggacaaggctgagctgttcctaacgcttgacatgatggataagcaggggattgaccctcagattctcatcgacgctgaccgttctcgccgcagcctaacaaaagagatgcagtacgaggatgacaaagcgtgggcggcactgaagaacaactcccagtccccagaactgtcccgcattccggccagtcttgatgctatggccagaaagatgtatgacagcgtcaagtaccgcacaggcaacagtgacatggccatggagcaggtcgacaagttcctcaaggaatccactgtgaccttcaaaggtgatgacgtggatggtgataccattggtattatcccgaagaacatcctacaggtcagtgatgaccctaagagctgggagcagggccgagacatcctcgaagaagcccgtaagggaatcatcgcggctaacccttgggtgaccaacaagcagctgacgatgtaccagcagggtgactctatctacatgatggacaccactggcactgtccgcatccgctacgacaaggagctactgactcgaacctatcaggaacagcagcagcgtctggccaaggaagccgaagagaaggcactgaaggaagcaaccaagcgtgcacctatctccgcagccactcaggcccgtaaggccgctggtgagcgtgtccgtgcgaaacgtaaagccactccgaagttcatctatggaggtggtgaccaataaccattaaggagacaacatgagctacgataagtccaaacctagcgattacgatggcattttccagaaggcagcagactctcatggggtctcctatgacctcctgcgtaagttatcgtttaacgaatcatccttcaaccctaaggccgtctctaagactggccctaagggcatcatgcagttcacccgcaacacggcccgagcgatgggccttaacgtgaccgatggtgacgacgatgggcgctataaccctgagttagccattgacgctggtgctaagctgcttgcgagcctcgttaagaagtacaacggggatgagctgaaagcggccctagcgtacaaccaaggggaaggcccagcgggtgctccccagctccaagcgtacgacaagggagacttcgggtctatctcggaggaaggccgtaactacatgcgcaagctgctggatgtggccaagagtccgaactcaggcgcactggaggcgttcggtggcatcaccccaaagggtaaagggattcccgcagaggatgccttcaagggcatcgctaaggctggaaaggttggtaccgaactgccggagtcccatgggttcgacattgagggtgtagcgcaggaagcaccaaacactccatacgctaaggacttctgggagaagaccgggactactctcgatgagtataactctcggtcaaccttcttcgggttcggggacgccgctgaggctcagattcagaactccacattaggtgtggccttccgtgctgcgcgggctgacgatgggtacgatgtgttcaaggacacgatgaccccgactcgctggaactcctatgttccctccaaggaagacctacagaagctgcgcgactccgggttacctccgagttactacggtgtggtgactggtggtgacggtgagaactgggatgcactcatcaagctggccaaggataacttcgaggctgaccaacgggccgctgaggctggtaccggggcgaaactcgctgctggtatcgttggtgccggtgtagacccactcagttatgtgcctctggtcggtgtggccgggaagggactcaaggtggtcaataaggccctgcgagtaggtgcacaggctggagcactcagcgttgcctctgagggaatccgtacgtcagtagctggtggcgaagctcactacgctgatgcagcacttggcgggttactgttcggtgctggaatgtcggccctcagtgacgctgtggctgctggtatccgtaaggcccgtggcgttgagtctgtgaatgagttcgcagggccagcactccgtatggaagcccgagagactgccatcaacactggtggtcacgacacctcgacactacctccagagaacttctcgttcgagcaggaccacagaggcgttccgtttgccgaccacccgaccgaagagggcgcagtggttctggccaatggttccatcctgagcgataccaaccctcttaacccaaggactcaacgcgacttcgcagagattgacccagagcgtgcagctcccggtatcaaactcggcgggttcactgagattggcctgaagaccttaggttccaaggatgcgggcgtacgtgcaatagctcaggacctcgtacgctctccaacagggatgcaatcagggtctagtggtaagttcggtgcgaccgcttcggatatccacgagcgcctacacgcgactgaccaacggatgtacaaccagctgtatgacgctgttgaccgtgccatgaaggacccggagttctccgtgggtgagcagaagatgtcacgtagagccatccgtcaggaagtctacaagcgtgcggccttggcgattgagcgtccagagttacaagctgatttgaccaaaggtgaacgtgaggtaatggacctgctgaaagagcacttcgacaccaagcgtgaactgatggagcagccgggtatcttcggtaacgccaacgccgtgagcatcttccccggtagtcgacacaagggtacctacgttcctaacgtgtacgacaggggtgctaaggaactgatgatgcagaagctgggcggacctgaaggactccaacaggcaatcgctcagagctggcttaccagctaccgagtgagacctgaggtcaaggcacgtgtcgacgagtacctgatggaactaaacggctacaagtcggtagaccaagtgacacctgaggtggtacagaagcacgctatggataaggcgtacggtatcagtcacactgaggacttcacggcatccagtgtcattgacgacaacatcacaggtctggtcggtatcgagaataactcgttccttgaggcccgtaacatgttcgacagcgacctcccggttaccttaccggatgggtctaccttcagcgtaaacgacctgagggacttcgacatggcacggattataccagcgtacgaccgtcgaattaacggtgatatctccatcatgggcggtagcggtaagaccacgcagcagctcaaggacgaaatcatggcgttagacaagcgggcagaacgcaagggacaactgaagggtgaagtggaagcactgaaggataccgttaagattctcactggacgtgctcgccgtaacaacgacacagcctttgagaccgctatgcgcaccctgaacgacctagcgttcttcgctaagaacttctacatgggtccgcagaacctcacagagattgctgggatgttggctaagggtaacgttaaggcgatgctccacggtatcccgacgttgcgtgacctagccaccagaacctctccggtgtccggtagtgaactccgtgaactccatggggcgctgttcggtaaggaactcgaccagttaatccgtccgggccgcgaggacatcgtacagcgaatccgcgaggcttccgataccagtggggccatggcgtcagtcattggtaccatcaagttcggtactcaggagctgtcggcgcgttctccttggaccaagatgctgaacggtacggctaactacattctggacactgcccgtcagggtgtgcttggtgatgtggctggtgcggccctaggcggtaagggttccaagtttggcaaggagaacttcctcaaagctgcctctatcagtcctgagcagtggaagggaatcaagcaactctttgtcgaccacgcgactcgtgatgctaacggccagttcaccatcaaggacaagaaggctttcagtcaggacccgagagcgatggacctatggcgtcttgccgataaggttgccgacgagaccatgctgcgacctcacaaggtatcccagcaggattccaaggcgtatggtgcgggtgtcaagatggctatgcagttcaagaacttcaccatcaagtcactcaacgccaagttcattcggtccttctacgagggctacaagaacaaccgcgctatcgacatggcgttgacccacgtgttgtctctgggtatcgccgggacttactttgcgatgcaggcccacgtgaaggcttacggtctccaagagtctcagcgtaaggactacctgaagaaagccctgaacccaaccatgctgggctacgcagcgttgactcgaagttcccacactggtgccccgctgtccatcgtctcgatgattgcaggtgccgctgggttccaagacgccaacatgctgcgctccaccatcttacctaaggaggaacagttccagaagaaagacggagcgtccaaaggtcgagccgagtcgagcaacctcgcgggtaacttagggtctcaggtcccagctctgggttacgtagggaacgtcattgcgaccgctaagaacgcctatggtgttgctacagcacccaataagccgactgagcgagactacatgactggcctgatgaactccaccaaggagcttgttccaaacgaccctctgacccaacagctcatcatgaaaatctatgaggccaacggagtaaccatcaaacagcagcctaaacccaactaattaggtagcactatagggagaccgattggtttcccttctcattcaactaaaggaggtcacaatggaccaagacattaaaacagtcattcagtacccagtaggggccactgagttcgacatcccgttcgactacctgtcccgtaagtttgtccgtgtgtcgctggtagctgacgacaaccgcagactgctgagtaatatcactgagtaccgctacgtgtctaagaccagagtgaagctcctcgtggcgaccactgggttcgaccgtgtggaaatccgcaggttcacctcagcgtctgagcgaatcgttgacttcggtgacggctccgtactgcgggcaacagaccttaacgtttctcagattcagtctgcccatatcgcagaggaagcacgtgattcagcgctgatggcaatgcctcaggatgacgcaggcaaccttgatgctcgtaaccgtagaatcgttaggttggcagacggcgttgaaactaccgacgctgtaaacaagggccagcttgattccactctcggagaggctggcggtatcttaggtgacatccagcagcttgagaaagacatccacggttaccttgagaacttcgcggatgataccactatggttcgtggagtaagctgggtgtacaacggtggttacgcgaatggtggtgagacctcatttgttatcgctaaggaaggccgtattgtcgccgttccgtacattgaggtaaacggtagtcgtcagttacgtggttatcactttgactatgactcgatcacgaagacagtcaccttggccaaaccattggtcgctggagactttgtggtgtgtcaaacagcggagtctgtaatcccattcttagaccttgtagctggtcctactggtgctgggcagattggtgtagctggtggcggtaccgttcaggacacaatcacccatgttactcctgagatgtttggcgctgtaggcccagaccacacagccgcccttaagtcggcctttgcgtaccctaacgtacagctcaagcccggtaaggtatacaccgtgtcggaagttctcccagcggcgaacctcaagagcttgaagggtaacggagcgactataaagtatgtcggcccagtatccacagggatgaccctgattaccatgggtacgcaaaaaggaaccatgataggtctctcagtctcggtaacagctggcacctctactgtaaccattccgggaatctcctcgatagcttctgttggggaccttctgtctctccgttcgtcaacccagcgtcttgctgccccagagtccaactacatgttcggacagcggtgcatcatccagtcgattaccggagacacggtgagattagtagagccactctttgagtcgttcactgcggtatcctgcacagtacatagcggagttccgttgagtgttgatggggttaccattgacatgacggctgtgggcaacacgacggcccttatcgagaccctttcgatgactggtgtcaaactgtcggtgtcaaactgcgcaatctacggcagcaacttctgctcagccgggcttgtactgcaaggatgcaacgccactgtcgaccgctcagtggtctttggtttcctgaatgcaaacggtgtgtcaggaggtgggcgtactggatacggtgtgtatattgactgtaacaacacaacgattgatggtaacaccatcggtggctgtaagcacgcaattacatgcgcctctcgctcattcgtcatgcgcggactgactgtaactagtaacaacgtatcatccattggcgcaaccaaccctgaggcggtccttgacctacacgccaacgttctcggctccccggtattcgtcaataatacaatcagcgcggcccgctctgcattcggtatccgcaacggtggggccaagattgtggataacaccatctactctgaccgctctggtgaggccaccccggcacttatcggtctcgatgagtaccctgatgtatacagtgtcgaggtttctgggaatatcctgaagtgtagcagcaacctgcgcctactgagtttcggtgagcttaacaccgtgaacaacttggtggtcgcggacaaccgtgggacaattggtagtatcattgaccaagccatgaacttggttagcatcaatgaccttaccatcgagggtaacgtactgagtggtatgtacggaatccttatggcaagccgacgttccattgcgtccacccagccgatgttctccaagctggaccgaccgcgaatcaagaacaacaggttcgactgtggggcaaacacggtttcgtccaacgtgatctctctgtggtctaacgccaacaccccggcatccggtaagctgtctgtaatcgaccttgagttcgatggtaattacatcactagtgcccacaccccaatctcgctggacttagtgagactggtaggcattacgtccttctcgaacaacaagctgcgccatgctacctccgctggtaccaccacaccgccgactcaatcgtctgtagcgctgacaaacgtcaatgtcgagatgcttgaggctcacggtaatgtgatgtcgggacgtatccggttcactgttgcagccactcagcggtcaaccaacattgcgtatcctgcggaggacttcgctatggcggcacgtatcctcgataacagcggccttggtgttaccttcgagaacctgaccaccacagggttcggcttcaagattgacaacagtgcagtccgtggcaacaccttcgtcaacccatatggtacgaccattggtatcgtcacgagcaacggcctgactggctggacgggtggagttctggatatcgtagataacacactgctacctgcttcaggtaacgctgtaggtattggcgttgggttccagacccactcgattgtaattcgtggaaaccttcttggtgcccctattgcggactcaagtacgccaagggttccgccagcaaacaacacgtcactttaaggagacattatgctgaacgattttaaccaaccacgaggctcgactttgggcctctacacccctagcctaactctgaagaaacgcttggagtctctcccgaacattctggacttcgactcagacagtcagaacgacgacagctcccgcttccgtaaggccattgcggctggtgtgaaatccctgtacgtgccggagccacagttctttggtagcaataagcccctgaagattgctaacgtggacattgggaccaacatccatatctatggtaacggctcagcgggataccgtcaggttggcggggccatcaccatcttggaaggggccagttatggatttaaactggctggtgttgattctcagacgcgaaacattggaggccgcattgacggtctctcgttccaaggtgagttcccaacgaccgttgccgatgccatccggtgccaatctgccagtagcttcgcgttggtcaacctctcgttcaggaacctctccgggtccgctctggacctgcgcgacttcatggagagtcacattgagcactgctactttaactcagtaggttccgacacaaagaacccaataaacatcggggacttcgtcgggtcggccccttggaacgtcaacaacctgcacattgagaacaacaccttcgggtcatgtagtgggaacattatcaacattagtgactcagctaacgccgacctcatttggattctcaacaataaattcgaatgggactcgaccccggtaagccccaacgtttccaacaaggcggtggtatacatcgggcgagccgagcgtgtcaacgtgtccggtaatggcttcgtgtactactacccggcccacaacaagtacgatgcccttatccgagtttccgataagtcggcttacggtaacttgttctccgataataccgcttggggctgtacgcctccttcaggtagtgacctcactccagcgttctattgggacattgctggtgggtcgtctgcggggtctaacaacaaggctaacacaaacctccctacgcgctgcaccagtatccactctcaggatatcgacgagccgctggtaaggactactccgggcaaccgaccaaacctccagagcatcggggcaatgtctcccggatatatatctgcgcactccttaggtggggccaatgcttccaacttctttgtaccagacactggtgctaccaagtacgggacggtgctagaggctcaaactggtggtgaggttcgccgcttgttcattcctaaggacattgttagccagcgtgcttgcgttcgagttcaggccagagtgatgccgtccccgacagctgatgctcttgtggggctgacctgtgatggctccattgtttccaccacaatccaaggcgcaacccaagactaccatacggtggcggctggtggcggctggcagattgtcgagtggctcatcccggcgtctagttacactgcgggccagttaatcttcacgaaccgtagtgacaccgttaagttcaaacttgatggcgtccgtgtgtcacgtgcagacttcgtagatgtgacgattgcatggagtccgaccccaatctccgcagggtctgtggtaaacaccactgcatcaatcactcgcgtaagttcccacgtggtcggcactagtggtctgaagacagatggtacgttaggtggagctgttggtagctcttatttcaaccgtggggccaataccttagtggtacagctggcagcactcacagcagccactccgtcaatcacgcaggttacggtcaggctgttccttaactaaggaggtaacatgttgtccctagacttcaacaacgaagttatcaaggcggctcccattgcgggggtcgctggggccgatggtgtagcgaggctcttctggggcctctcactcaacgagtggttctacgtcgcggcaatcgcctacacagtggttcagattggtgccaaggtagtcgacaaaatcattgactggaagaaagcaaataaggagtaacatatggacctgattaagttcctcgaaatgttagacactgagatggcgcagcagatgctcatggacctgaagaatcccgagaagcgaacccctcagctgtacaacgccattggtaaactactggagcgacacaagttccaaatctctaagctgacccctgacgttaacatcttgggcggactggctgagggtctggaggcttacaactccaaggtgggcgaggatggtctgacagacgacgataagttcaccctacagtgatatactcaaggtactactatatgtagtgcctttatggatgtcattgcactacgctaggcgttcctacgtgaaatctgagaaacaacgggaggcattatgctggagttcacaaagagaatcgtcccgtatcttgtggctatcatggtgtttgccttcgggtggcacttgggttcacaatctacggacgctaaatggaaggaggtagtacagaatgaatacgttaagaagcaaacggctagagctgaaactcagaaagcgattgacgcagtatcggctaagtaccaagcagaccttgaggggctggagggcagcactgataggattattgctgatttgcgtagcgacaataagcggctgcgcgtcagagtcaaacctaccagtgtcgccgcaggaccagacggtcgatgcctcgttgatggttccgtcgaactacacgaagcaactgctcgaagtcttatcgcaataacccagaaggcagacctcaaagagaaggccctacaggacacaattcgtaagctacagcggaaaggaggtgaacattgagtaactctcagcaagccaagaacgccttaatcattgcgcaactgaagggtgactttgtcgcctttctcttcgtgctctggaaggccctgaacctgccggaacccaccaagtgtcaaatcgacatggccaagtgtctggcaaacccaaagaacaagaagtttatccttcaggctttccgtggtatcgggaagtcattcatcacgtgtgcgttcgtagtgtggaccctgtggcgtgaccctcagttaaagatactgattgtctcagcctcaaaggaacgtgcggacgctaactccatcttcatcaagaacatcatcgacttgttgcctttcctgagtgagcttaagcctcgccccggtcagcgtgactctgtgattagctttgatgtaggccctgccaagcctgaccacagcccgtcagttaagtctgtgggtattacgggtcagcttactggtagccgtgccgatatcatcattgcggatgacgtggagattcccggtaactctgcaactcaaggtgcccgcgagaaactatggacgttggttcaggagttcgccgcactgttgaaacctctgccgactagccgtgttatctacctgggtacacctcagaccgagatgacgctctacaaggaacttgaggacaaccgcgggtactccacaatcatctggcctgcgcagtatcctcgctccaaagaggaagacctgtactatggcgaccgtctggctcctatgctccgtagcgagtacgatgaggacaaagagggcctcagcagtcagcctactgacccggttcgatttgactccatggaccttcaggaacgtgaggtggaatacggcaaggcaggctatacgcttcagttcatgctcaacccgaacctcagtgacgccgagaagtacccgctacgcctccgtgacgctatcgtgtgcggtctacagatggacaaggccccaatgcattaccagtggttgccgaaccgtcagaaccgcaatgaggagcttcctaacgtgggcatgaagggtgacgagatttactccttccatacagcctccagtaacactggtgcgtatcagggtaagattctggtcattgacccaagtggtcgcggtaaggatgagactggctggtgcgtactgtacaccctcaacggctacatctacttgatggacgctggcggtactcgcggttacgaagagaagtcccttgagttcctcgctaagaaagccaaacagtggcaggtgcagactgtggtcttcgagagtaacttcggtgacggtatgttcggtaacgtgttccagcctgtgctcctgaagcaccacccagcgcagctcgaagagattcgtgctcgtggtatgaaagaggtccgtatctgcgatacccttgagcctgtactggctagtcaccgcttggtcatccgtgatgaggttatccgacaggactaccagacggcacgtgacgcagacggtaagcacgctctgaagtacagcctgttctaccagatgacccgtatgagccgtgagaagggcgctgtggcacacgatgaccgacttgatgcgttagcattgggtgtcgagttcctacgctccacgatgcagcaggacgctgtgaagatagaggctgaggtacttcaggagttcttggagcaccacatggagaagcctctgagcaacatctcccagttccgggccaccagcagcaacggtgtggacatccgatgggaagacgacggggatgacactatgttcatcgcatggtgattatgcagggattgtgcataaggattcattaggccacggaaggccacttcaggaaaacttcaggcataacagacacttggaattaggtagcactatagggagagacccctaaagacttactataagactacttaaagtttcattcatatagttatgcactacaggtctcctctacgagagagggtagtgatgataatatcaccctctaactataagacactaagagctaacacagggaggacctatgcgcttactgttaaccttactgcgccataggactacttggcggtttctgctggtacttgctggtgcccttggggcttcactggttactcagcaacaactcggtggactggagactctcgtgtgctctctactcacttgtagcgattagggtcttcctgacgcgctagggattccgtagtgatgcttatcagcatacaccactccatccctctacagtcaatacttaaagttaaccttaggtgattcactgggtctacctacgggtctatgcactgacctgaggactacctgaggttacctttaagaatttgacataaagttctgagtgtacatctcacagtttgcacttttggttatccccccccggtacccctccagttcacccaaagtaaccatgggtacccctaaaccttcggtttaaccttgggtggtaccttggggaaacctgaggtgatactatatgttgtggtgtgggtgacgttgggtgactatatgctgatgtctccgtgtccctatctgttggtactcattaagtcacaccttgagtcactcctgaggtaacaacctgaggttagacctgaggccatccattgacactatgccataggttcaccgtgtgactaacgtttagcagtgactgttagtaggtcacattgagagcatcattaagtatctcgtttagcagtccctgagacactgagagcgggacaagatgatatcggtgagtcatcactataagggctattggtggtcagtgtcaacaccataatcaattaggtatcactatagggagacacttaaagtattactaagagaccattaccaataagaacactatcactataggtctaactaaaagtttaactttaagtgttgacattcagattccgttatgagacattagcaaccgttgagagacacaacgtcaccaacgaccagacaataccacgagttatctggtcagactgagggtctcaagtagtcatcaaccggacatacgaaagtggttgactcaacgatgaacaagtagtaagatgcaccacagattcacgaagtacctagcagtatcgctctttaacaatatggattagtcgctgatatgtacaccatgataatagtgtttaactagtggttgcattcaggtctctggcaaggtacgtcctgtcaccctgagagtaaccacactgataaccactagcgctaggtaactagcaacaacatcgaggatacacagcatggaaatcgtaatgcaggcactgaaccacggggtcattatgacgacagcacgggactacaccggggccaccaaatacatggtccaatacggcttacagttcacagtgttcgactcattccgtgaggcactgcaagactatactgattgcgtcacccactcacaggagtgcggagactagcggttaacgacaggtcatccgagcggtggcctgaaagataaccactaactgaaggatacacaccatgatttacaccaaagagccagctaacaaggtattcgtgttcgttaccgcttaccgtggccatgagtcgctcgaagttaacgagaagatgctcaagggtcttgtacgcaccattaagacctatccgggtgcttacggtaatatccgtgatgagaacgtgcaaggctgctttaaagaagcgggtatgcctgaggcaacgcaagaacgcacgctcaaggttgaatgcactgagaagcaagccgcagagttgacatggctggcctgtaagacctactcgcaggatgctgtgctggtggtgaactcacagactcacacagcggcactgtggtctatcgaggatgtaggcgagtatccgcaggcatacccaacgctcaaagaggtggccttaggtggcacgctacaacaagtggatgagccaaaaggtgagtgctactcagtgattggcgggcaatactgggaggtcgtatgaaacactacggactcactcaggcagacattaggcactaccgctggctgctctcaatgggcagaccgcacgactacctgatgatgcacctagcgcaaacctatcgcacacgtaaggtaatgtatggtaaccctgttcgtaattagcgtgtacgccctgattgtcctgtactttgtgcgggactttcgcaagggtctcaaggtacacaaagcatcatttagttacatgaagtggggcgtgttgcctcgctttactgtacgactacctaatggccgctttaaggctaacaaggtaggtattttctacatcgcaacccattgacacaccacacataaggaaacaaccaaatgaactacaccgatatgcaagaacgcttagacgccatccgtaacctgccaatctgtgaactagacaagcgccagccgctgctagtggaactcatcgctgacattgtgaacgctgagacatccgacggtgacgatacggacagcgattggggtctggagcgtcaggactattggcaaaccctgaagattaaggccaaagacgccgggtttaacctgctgggtaatggccacttcagcgcagcgtttaagcacgacctgttaccgggtagggtcattaaggttggctttaagaaagaggactcaggggccgcctacgtggctttctgccggatgcaccaaggtcgggtagggatacctaacgtctatcacgtagcgcgtcacgctgggtgctacacggtggtacttgatgagctggaaccatgcaatcgcagcggtaaccacttgcacgaccgctacgcagacctagcgtattacttcgtcgagggcgaatctgacccggaggactacgcggaggctgaccagccgtttattgagacgtgccaaatgattcgcaagttcttctacgggattgcgtcctttgatatgcacagcggaaacatcatgttcaccaaagacggcaagccagtgattaccgacccggtgtcattctcagcggaccgggaccgtgagcctttctcactggagcctgaggacctgcttgctgagattgagcaaatagcgcacgataagatgattgaacgctgtaagcgcaacaaggctaagcgagaccgtgacagcacgttgtgccgcgcccgtagggccaacaacaaggcccgcagaaaccgcgccaaagccgccgctaggtggcgtaaggagcgtgaacgtgagcgtgagcagtatcatgtagacgccctaaaggcagacctagcgagcattgaggcgcgagttctggcgtggcacatgggacccggcctagcgatacagcagggcaagccgttaccaatcgacaactaccttcaaggtagacttatgggttaacgaggtgtatcttaggtgtctccgaacggtgaggcaccaatagataaactttattcacaaagaggcacaca
